United States Patent Application Publication US 2026/0109938 A1 - sequence listing, part 7

SEQ ID NO: 4 - DNA, 3977488 bp, Escherichia coli (residues 1-1,988,744 of 3,977,488)
  source 1..3977488: mol_type = genomic DNA
agcttttcattctgactgcaacgggcaatatgtctctgtgtggattaaaaaaagagtgtctgatagcagcttctgaactggttacctgccgtgagtaaattaaaattttattgacttaggtcactaaatactttaaccaatataggcatagcgcacagacagataaaaattacagagtacacaacatccatgaaacgcattagcaccaccattaccaccaccatcaccattaccacaggtaacggtgcgggctgacgcgtacaggaaacacagaaaaaagcccgcacctgacagtgcgggctttttttttcgaccaaaggtaacgaggtaacaaccatgcgagtgttgaagttcggcggtacaagtgtggcaaatgcagaacgttttctgcgtgttgccgatattctggaaagcaatgccaggcaggggcaggtggccaccgtcctctctgcccccgccaaaatcaccaaccacctggtggcgatgattgaaaaaaccattagcggccaggatgctttacccaatatcagcgatgccgaacgtatttttgccgaacttttgacgggactcgccgccgcccagccggggttcccgctggcgcaattgaaaactttcgtcgatcaggaatttgcccaaataaaacatgtcctgcatggcattagtttgttggggcagtgcccggatagcatcaacgctgcgctgatttgccgtggcgagaaaatgagcatcgccattatggccggcgtattagaagcgcgcggtcacaacgttactgttatcgatccggtcgaaaaactgctggcagtggggcattacctcgaatctaccgtcgatattgctgagtccacccgccgtattgcggcaagccgcattccggctgatcacatggtgctgatggcaggtttcaccgccggtaatgaaaaaggcgaactggtggtgcttggacgcaacggttccgactactctgctgcggtgctggctgcctgtttacgcgccgattgttgcgagatttggacggacgttgacggggtctatacctgcgacccgcgtcaggtgcccgatgcgaggttgttgaagagcatgtcctaccaggaagcgatggagctttcctacttcggcgctaaagttcttcacccccgcaccattacccccatcgcccagttccagatcccttgcctgattaaaaataccggaaatcctcaagcaccaggtacgctcattggtgccagccgtgatgaagacgaattaccggtcaagggcatttccaatctgaataacatggcaatgttcagcgtttctggtccggggatgaaagggatggtcggcatggcggcgcgcgtctttgcagcgatgagtcgcgcccgtatttccgtggtgctgattacgcaaagttcttccgaatacagcatcagtttctgcgttccacaaagcgactgtgtgcgagctgaacgggcaatgcaggaagagttctacctggaactgaaagaaggcttactggagccgctggcagtgacggaacggctggccattatcagcgtggtaggtgatggtatgcgcaccttgcgtgggatcagcgcgaaattctttgccgcactggcccgcgccaatatcaacattgtcgccattgctcagggatcttctgaacgcagtatctctgtcgtggtaaataacgatgatgcgaccactggcgtgcgcgttactcatcagatgctgttcaataccgatcaggttatcgaagtgtttgtgattggcgtcggtggcgttggcggtgcgctgctggagcaactgaagcgtcagcaaagctggctgaagaataaacatatcgacttacgtgtctgcggtgttgccaacagcaaggctctgctcaccaatgtacatggccttaatctggaaaactggcaggaagaactggcgcaagccaaagagccgtttaatctcgggcgcttaattcgcctcgtgaaagaatatcatctgctgaacccggtcattgttgactgcacttccagccaggcagtggcggatcaatatgccgacttcctgcgcgaaggtttccacgttgtcacgccgaacaaaaaggccaacaccagcagcatggattactaccatcagttgcgttatgcggcggaaaaaagccggcgtaaattcctctatgacaccaacgttggggctggattaccggttattgagaacctgcaaaatctgctcaatgcaggtgatgaattgatgaagttctccggcattctttctggtagcctttcttatatcttcggcaagttagacgaaggcatgagtttctccgaggcgaccacgctggcgcgggaaatgggttataccgaaccggacccgcgagatgatctttctggtatggatgtggcgcgtaaactattgattctcgctcgtgaaacgggacgtgaactggagctggcggatattgaaattgaacctgtgctgcccgcagagtttaacgccgagggtgatgttgccgcttttatggcgaatctgagtcaactcgacgatctctttgccgcgcgcgtggcgaaggcccgtgatgaaggaaaagttttgcgctatgttggcaatattgatgaagatggcgtctgccgcgtgaagattgccgaagtggatggtaatgatccgctgttcaaagtgaaaaatggcgaaaacgccctggccttctatagccactattatcagccgctgccgttggtactgcgcggatatggtgcgggcaatgacgttacagctgccggtgtctttgctgatctgctacgtaccctcagttggaagttaggagtctgacatggttaaagtttatgccccggcttccagtgccaatatgagcgtcgggtttgatgtgctcggggcggcggtgacacctgttgatggtgcattgctcggagatgtagtcacggttgaggcggcagagacattcagtctcaacaacctcggacgctttgccgataagctgccgagtgaaccacgggaaaatatcgtttatcagtgctgggagcgtttttgccaggaactgggtaagcaaattccagtggcgatgaccctggaaaagaatatgccgatcggtagcggcttaggctccagtgcctgtagcgtggtcgcggcgctgatggcgatgaatgaacactgcggcaagccgcttaatgacactcgtttgctggctttgatgggcgagctggaaggccgtatctccggcagcattcattacgacaacgtggcaccgtgttttctcggtggtatgcagttgatgatcgaagaaaacgacatcatcagccagcaagtgccagggtttgatgagtggctgtgggtgctggcgtatccggggattaaagtcagcacggcagaagccagggctattttaccggcgcagtatcgccgccaggattgcattgcgcacgggcgacatctggcaggcttcattcacgcctgctattcccgtcagcctgagcttgccgcgaagctgatgaaagatgttatcgctgaaccctaccgtgaacggttactgccaggcttccggcaggcgcggcaggcggtcgcggaaatcggcgcggtagcgagcggtatctccggctccggcccgaccttgttcgctctgtgtgacaagccggaaaccgcccagcgcgttgccgactggttgggtaagaactacctgcaaaatcaggaaggttttgttcatatttgccggctggatacggcgggcgcacgagtactggaaaactaaatgaaactctacaatctgaaagatcacaacgagcaggtcagctttgcgcaagccgtaacccaggggttgggcaaaaatcaggggctgttttttccgcacgacctgccggaattcagcctgactgaaattgatgagatgctgaagctggattttgtcacccgcagtgcgaagatcctcagcgcgtttattggtgatgaaatcccacaggaaatcctggaagagcgcgtgcgcgcggcgtttgccttcccggctccggtcgccaatgttgaaagcgatgtcggttgtctggaattgttccacgggccaacgctggcatttaaagatttcggcggtcgctttatggcacaaatgctgacccatattgcgggtgataagccagtgaccattctgaccgcgacctccggtgataccggagcggcagtggctcatgctttctacggtttaccgaatgtgaaagtggttatcctctatccacgaggcaaaatcagtccactgcaagaaaaactgttctgtacattgggcggcaatatcgaaactgttgccatcgacggcgatttcgatgcctgtcaggcgctggtgaagcaggcgtttgatgatgaagaactgaaagtggcgctagggttaaacagcgctaacagcattaacatcagccgtttgctggcgcagatttgctactactttgaagctgttgcgcagctgccgcaggagacgcgcaaccagctggttgtcagcgtgccaagcggaaacttcggcgatttgacggcgggtctgctggcgaagagtctcggtctgccggtgaaacgttttattgctgcgaccaacgtgaacgataccgtgccacgtttcctgcacgacggtcagtggagtcccaaagcgactcaggcgacgttatccaacgcgatggacgtgagtcagccgaacaactggccgcgtgtggaagagttgttccgccgcaaaatctggcaactgaaagagctgggttatgcagccgtggatgatgaaaccacgcaacagacaatgcgtgagctaaaagaactgggctacactagcgagccgcacgctgccgtagcttatcgtgcgctgcgtgatcagttgaatccaggcgaatatggcttgttcctcggcaccgcgcatccggcgaaatttaaagagagcgtggaagcgattctcggtgaaacgttggatctgccaaaagagctggcagaacgtgctgatttacccttgcttagtcataatctgcccgccgattttgctgcgttgcgtaaattgatgatgaatcatcagtaaaatctattcattatctcaatcaggccgggtttgcttttatgcagcccggcttttttatgaagaaattatggagaaaaatgacagggaaaaaggagaaattctcaataaatgcggtaacttagagattaggattgcggagaataacaaccgccgttctcatcgagtaatctccggatatcgacccataacgggcaatgataaaaggagtaacctgtgaaaaagatgcaatctatcgtactcgcactttccctggttctggtcgctcccatggcagcacaggctgcggaaattacgttagtcccgagtgtaaaattacagataggcgatcgtgataatcgtggctattactgggatggaggtcactggcgcgaccacggctggtggaaacaacattatgaatggcgaggcaatcgctggcacctacacggaccgccgccaccgccgcgccaccataagaaagctcctcatgatcatcacggcggtcatggtccaggcaaacatcaccgctaaatgacaaatgccgggtaacaatccggcattcagcgcctgatgcgacgctggcgcgtcttatcaggcctacgttaattctgcaatatattgaatctgcatgcttttgtaggcaggataaggcgttcacgccgcatccggcattgactgcaaacttaacgctgctcgtagcgtttaaacaccagttcgccattgctggaggaatcttcatcaaagaagtaaccttcgctattaaaaccagtcagttgctctggtttggtcagccgattttcaataatgaaacgactcatcagaccgcgtgctttcttagcgtagaagctgatgatcttaaatttgccgttcttctcatcgaggaacaccggcttgataatctcggcattcaatttcttcggcttcacgcttttaaaatactcatcactcgccagattaatcaccacattatcgccttgtgctgcgagcgcctcgttcagcttgttggtgatgatatctccccagaattgatacagatctttccctcgggcattctcaagacggatccccatttccagacgataaggctgcattaaatcgagcgggcggagtacgccatacaagccggaaagcattcgcaaatgctgttgggcaaaatcgaaatcgtcttcgctgaaggtttcggcctgcaagccggtgtagacatcacctttaaacgccagaatcgcctggcgggcattcgccggcgtgaaatctggctgccagtcatgaaagcgagcggcgttgatacccgccagtttgtcgctgatgcgcatcagcgtgctaatctgcggaggcgtcagtttccgcgcctcatggatcaactgctgggaattgtctaacagctccggcagcgtatagcgcgtggtggtcaacgggctttggtaatcaagcgttttcgcaggactaataagaatcagcatatccagtccttgcaggaaatttatgccgactttagcaaaaaatgagaatgagttgatcgatagttgtgattactcctggctaacatcatcccacgcgtccggagaaagctggcgaccgatatccggataacgcaatggatcaaacaccgggcgcacgccgagtttacgctggcgtagataatcactggcaatggtatgaaccacagggctgagcagtaaaatggcggtcaaattggtaatagccatgcaggccattatgatatctgccagttgccacatcagcggaaggcttagcaaggtgccgccgatgaccgttgcgaaggtgcagatccgcaaacaccagatcgctttagggttgttcaggcgtaaaaagaagagattgttttcggcataaatgtagttggcaacgatggagctgaaggcaaacagaataaccacaagggtaacaaactcagcaccccaggaacccattagcacccgcatcgccttctggataagctgaataccttccagcggcatgtaggttgtgccgttacccgccagtaatatcagcatggcgcttgccgtacagatgaccagggtgtcgataaaaatgccaatcatctggacaatcccttgcgctgccggatgcggaggccaggacgccgctgccgctgccgcgtttggcgtgctacccattcccgcctcattggaaaacatactgcgctgaaaaccgttagtaatcgcctggcttaaggtatatcccgccgcgccgcctgccgcttcctgccagccaaaagcactctcaaaaatagaccaaatgacgtggggaagttgcccgatattcattacgcaaattaccaggctggtcagtacccagattatcgccatcaacgggacaaagccctgcatgagccgggcgacgccatgaagaccgcgagtgattgccagcagagtaaagacagcgagaataatgcctgtcaccagcgggggaaaatcaaaagaaaaactcagggcgcgggcaacggcgttcgcttgaactccgctgaaaattatgccataggcgatgagcaaaaagacggcgaacagaacgcccatccagcgcatccccagcccgcgcgccatataccatgccggtccgccacgaaactgcccattgacgtcacgttctttataaagttgtgccagagaacattcggcaaagctggtcgccatgccgataaacgcggcaacccacatccaaaagacggctccaggtccaccggcggtaatagccagcgcaacgccggccaggttgccgctacccacgcgcgccgcaagactggtacacaaactctgaaaactggttaaaccgcctggctgtggatgaatgctatttttaagacttttgccaaactggcggatgtagcgaaactgcacaaatccggtgcgaaaagtgaaccaacaacctgcgccgaagagcaggtaaatcattacgcttccccaaaggacgctgttaatgaaggagaaaaaatctggcatgcatatccctcttattgccggccgcgatgactttcctgtgtaaacgttaccaattgtttaagaagtatatacgctacgaggtacttgataacttctgcgtagcatacatgaggttttgtataaaaatggcgggcgatatcaacgcagtgtcagaaatccgaaacagtctcgcctggcgataaccgtcttgtcggcggttgcgctgacgttgcgtcgtgatatcatcagggcagaccggttacatccccctaacaagctgtttaaagagaaatactatcatgacggacaaattgacctcccttcgtcagtacaccaccgtagtggccgacactggggacatcgcggcaatgaagctgtatcaaccgcaggatgccacaaccaacccttctctcattcttaacgcagcgcagattccggaataccgtaagttgattgatgatgctgtcgcctgggcgaaacagcagagcaacgatcgcgcgcagcagatcgtggacgcgaccgacaaactggcagtaaatattggtctggaaatcctgaaactggttccgggccgtatcagtactgaagttgatgcgcgtctttcctatgacaccgaagcgagtattgcgaaagcaaaacgcctgatcaaactctacaacgatgctggtattagcaacgatcgtattctgatcaaactggcttctacctggcagggtatccgtgctgcagaacagctggaaaaagaaggcatcaactgtaacctgaccctgctgttctccttcgctcaggctcgtgcttgtgcggaagcgggcgtgttcctgatcagcccgtttgttggccgtattcttgactggtacaaagcgaataccgataagaaagagtacgctccggcagaagatccgggcgtggtttctgtatctgaaatctaccagtactacaaagagcacggttatgaaaccgtggttatgggcgcaagcttccgtaacatcggcgaaattctggaactggcaggctgcgaccgtctgaccatcgcaccggcactgctgaaagagctggcggagagcgaaggggctatcgaacgtaaactgtcttacaccggcgaagtgaaagcgcgtccggcgcgtatcactgagtccgagttcctgtggcagcacaaccaggatccaatggcagtagataaactggcggaaggtatccgtaagtttgctattgaccaggaaaaactggaaaaaatgatcggcgatctgctgtaatcattcttagcgtgaccgggaagtcggtcacgctacctcttctgaagcctgtctgtcactcccttcgcagtgtatcattctgtttaacgagactgtttaaacggaaaaatcttgatgaatactttacgtattggcttagtttccatctctgatcgcgcatccagcggcgtttatcaggataaaggcatccctgcgctggaagaatggctgacaagcgcgctaaccacgccgtttgaactggaaacccgcttaatccccgatgagcaggcgatcatcgagcaaacgttgtgtgagctggtggatgaaatgagttgccatctggtgctcaccacgggcggaactggcccggcgcgtcgtgacgtaacgcccgatgcgacgctggcagtagcggaccgcgagatgcctggctttggtgaacagatgcgccagatcagcctgcattttgtaccaactgcgatccttagccgtcaggtgggcgtgattcgcaaacaggcgctgatccttaacttacccggtcagccgaagtctattaaagagacgctggaaggtgtgaaggacgctgagggtaacgttgtggtacacggtatttttgccagcgtaccgtactgcattcagttgctggaagggccatacgttgaaacggcaccggaagtggttgcagcattcagaccgaagagtgcaagacgcgacgttagcgaataaaaaaatccccccgagcggggggatctcaaaacaattagtgggattcaccaatcggcagaacggtgcgaccaaactgctcgttcagtacttcacccatcgccagatagattgcgctggcaccgcagatcagcccaatccagccggcaaagtggatgattgcggcgttaccggcaatgttaccgatcgccagcagggcaaacagcacggtcaggctaaagaaaacgaattgcagaacgcgtgcgcctttcagcgtgccgaagaacataaacagcgtaaatacgccccacagacccaggtagacaccaaggaactgtgcatttggcgcatcggtcagacccagtttcggcatcagcagaatcgcaaccagcgtcagccagaaagaaccgtaagaggtgaatgcggttaaaccgaaagtgttgccttttttgtactccagcagaccagcaaaaatttgcgcgatgccgccgtagaaaatgcccatggcaagaataatgccgtccagagcgaaataacccacgttgtgcaggttaagcagaatggtggtcatgccgaagcccatcaggcccagcggtgccggattagccaacttagtgttgcccataattcctcaaaaatcatcatcgaatgaatggtgaaataatttccctgaataactgtagtgttttcagggcgcggcataataatcagccagtggggcagtgtctacgatcttttgaggggaaaatgaaaattttccccggtttccggtatcagacctgagtggcgctaaccatccggcgcaggcaggcgatttgcagtacggctggaatcgtcacgcgataggcgctgccgctgaccgctttaaccccatttagtgccgcacctacagggccttccagccccgcgccgcgcagcaaaccatgcccaagtacgctcattgctgcgtgggtgcgtaaaatgcgggtcagttggctggaaagcaaatggctcacaccttttgccaataatttgtctttcatcagcagcggcagcagctcttccagctcattcaccctggcatcgaccgcgtgcagaaactcctgcttatgttcctcgtccattttcttccaggtattacgcagaaattgttccagtaactgttgctcaatttcaaacgtagacatctctttgtcggctttcagcttcaatcgcttactaacatcgagcaaaatggcccgatacaatttaccgtgtccgcgcagtttgttggcgatactatcgccaccaaaatgctgtaattctccggcaatcagctgccagttgcggcgatgttgctcgggatgcccttccatgcttttaaacagttcgttgcgcatcagtacgctggagaggcgagttttgcctttttcattatgggtgagcaatcgggcgaaatttgccaactgttcctcactacaatgctgaagaaaatccagatcactatcattcaggtaattaacattcattttttgtggcttctatattctggcgttagtcgtcgccgataattttcagcgtggccatatcgctactgttcaccgtatgaccgctaaaggtgattttactgacgcagcgtttattgtcgttatcgctgttaatgttgatccagtcagtggtttgcccttcttttatttcactaggaatattcaggctctgactggcgctacgggcggctttgaaataaacgcttgcaccgcttaactgtaaatcgccatggtcggcagagagttgtatgcgtttcacaatgcgacaaacaggaagtttcagcgccagatcgttggtttcgttacgcggcattgcaatggcgccgaggagtttatggtcgtttgcctgcgccgtgcagcacagcatcaggctaatcgccaggctggcggaaatcgtaaaaacggatttcataaggattctcttagtgggaagaggtagggggatgaatacccactagtttactgctgataaagagaagattcaggcacgtaatcttttctttttattacaattttttgatgaatgccttggctgcgattcattctttatatgaataaaattgctgtcaattttacgtcttgtcctgccatatcgcgaaatttctgcgcaaaagcacaaaaaatttttgcatctcccccttgatgacgtggtttacgaccccatttagtagtcaaccgcagtgagtgagtctgcaaaaaaatgaaattgggcagttgaaaccagacgtttcgcccctattacagactcacaaccacatgatgaccgaatatatagtggagacgtttagatgggtaaaataattggtatcgacctgggtactaccaactcttgtgtagcgattatggatggcaccactcctcgcgtgctggagaacgccgaaggcgatcgcaccacgccttctatcattgcctatacccaggatggtgaaactctagttggtcagccggctaaacgtcaggcagtgacgaacccgcaaaacactctgtttgcgattaaacgcctgattggtcgccgcttccaggacgaagaagtacagcgtgatgtttccatcatgccgttcaaaattattgctgctgataacggcgacgcatgggtcgaagttaaaggccagaaaatggcaccgccgcagatttctgctgaagtgctgaaaaaaatgaagaaaaccgctgaagattacctgggtgaaccggtaactgaagctgttatcaccgtaccggcatactttaacgatgctcagcgtcaggcaaccaaagacgcaggccgtatcgctggtctggaagtaaaacgtatcatcaacgaaccgaccgcagctgcgctggcttacggtctggacaaaggcactggcaaccgtactatcgcggtttatgacctgggtggtggtactttcgatatttctattatcgaaatcgacgaagttgacggcgaaaaaaccttcgaagttctggcaaccaacggtgatacccacctggggggtgaagacttcgacagccgtctgatcaactatctggttgaagaattcaagaaagatcagggcattgacctgcgcaacgatccgctggcaatgcagcgcctgaaagaagcggcagaaaaagcgaaaatcgaactgtcttccgctcagcagaccgacgttaacctgccatacatcactgcagacgcgaccggtccgaaacacatgaacatcaaagtgactcgtgcgaaactggaaagcctggttgaagatctggtaaaccgttccattgagccgctgaaagttgcactgcaggacgctggcctgtccgtatctgatatcgacgacgttatcctcgttggtggtcagactcgtatgccaatggttcagaagaaagttgctgagttctttggtaaagagccgcgtaaagacgttaacccggacgaagctgtagcaatcggtgctgctgttcagggtggtgttctgactggtgacgtaaaagacgtactgctgctggacgttaccccgctgtctctgggtatcgaaaccatgggcggtgtgatgacgacgctgatcgcgaaaaacaccactatcccgaccaagcacagccaggtgttctctaccgctgaagacaaccagtctgcggtaaccatccatgtgctgcagggtgaacgtaaacgtgcggctgataacaaatctctgggtcagttcaacctagatggtatcaacccggcaccgcgcggcatgccgcagatcgaagttaccttcgatatcgatgctgacggtatcctgcacgtttccgcgaaagataaaaacagcggtaaagagcagaagatcaccatcaaggcttcttctggtctgaacgaagatgaaatccagaaaatggtacgcgacgcagaagctaacgccgaagctgaccgtaagtttgaagagctggtacagactcgcaaccagggcgaccatctgctgcacagcacccgtaagcaggttgaagaagcaggcgacaaactgccggctgacgacaaaactgctatcgagtctgcgctgactgcactggaaactgctctgaaaggtgaagacaaagccgctatcgaagcgaaaatgcaggaactggcacaggtttcccagaaactgatggaaatcgcccagcagcaacatgcccagcagcagactgccggtgctgatgcttctgcaaacaacgcgaaagatgacgatgttgtcgacgctgaatttgaagaagtcaaagacaaaaaataatcgccctataaacgggtaattatactgacacgggcgaaggggaatttcctctccgcccgtgcattcatctaggggcaatttaaaaaagatggctaagcaagattattacgagattttaggcgtttccaaaacagcggaagagcgtgaaatcagaaaggcctacaaacgcctggccatgaaataccacccggaccgtaaccagggtgacaaagaggccgaggcgaaatttaaagagatcaaggaagcttatgaagttctgaccgacagccaaaaacgtgcggcatacgatcagtatggtcatgctgcgtttgagcaaggtggcatgggcggcggcggttttggcggcggcgcagacttcagcgatatttttggtgacgttttcggcgatatttttggcggcggacgtggtcgtcaacgtgcggcgcgcggtgctgatttacgctataacatggagctcaccctcgaagaagctgtacgtggcgtgaccaaagagatccgcattccgactctggaagagtgtgacgtttgccacggtagcggtgcaaaaccaggtacacagccgcagacttgtccgacctgtcatggttctggtcaggtgcagatgcgccagggattcttcgctgtacagcagacctgtccacactgtcagggccgcggtacgctgatcaaagatccgtgcaacaaatgtcatggtcatggtcgtgttgagcgcagcaaaacgctgtccgttaaaatcccggcaggggtggacactggagaccgcatccgtcttgcgggcgaaggtgaagcgggcgagcatggcgcaccggcaggcgatctgtacgttcaggttcaggttaaacagcacccgattttcgagcgtgaaggcaacaacctgtattgcgaagtcccgatcaacttcgctatggcggcgctgggtggcgaaatcgaagtaccgacccttgatggtcgcgtcaaactgaaagtgcctggcgaaacccagaccggtaagctattccgtatgcgcggtaaaggcgtcaagtctgtccgcggtggcgcacagggtgatttgctgtgccgcgttgtcgtcgaaacaccggtaggcctgaacgaaaggcagaaacagctgctgcaagagctgcaagaaagcttcggtggcccaaccggcgagcacaacagcccgcgcagtaagagcttctttgatggtgtgaagaagttttttgacgacctgacccgctaacctccccaaaagcctgcccgtgggcaggcctgggtaaaaatagggtgcgttgaagatatgcgagcacctgtaaagtggcggggatcactctacctcaatgtgtatcacaatatccatattctttgtgggggagtctggagattgagtagatattcttgttcagaatgtatcagccgatggttctacgattcttaagccacgaagagttcagatagtacaacggcatgtctcttttgactatctggcaaccggcagtgtgttctctcacgcatcacaaaagcagcaggcataaaaaaacccgcttgcgcgggctttttcacaaagcttcagcaaattggcgattaagccagtttgttgatctgtgcagtcaggttagccttatgacgtgcagctttgtttttgtggatcagacctttagcagcctgacggtccacgatcggttgcatttcgttaaatgctttctgtgcagcagctttgtcgccagcttcgatagctgcgtatactttcttgatgaaagtacgcatcatagagcgacggcttgcgttgtgcttacgagccttttcagactgaatggcgcgcttcttagcacttttgatattagccaaggtccaactcccaaatgtgttctatatggacaattcaaaggccgaggaatatgcccttttagccttcttttgtcaatggatttgtgcaaataagcgccgttaatgtgccggcacagcttacgtagtgatggcgcaggattctaccagcttgcggggtgtgaatacagcttttccgcgataaaaattgcagcaggcggtcagtttcttcccgtgatttgcgccatggcaatgaaaagccacttctttctgattagcgtactcaatcgccggttaaccttgaccgctgtacaaggtatactcggacgatttagcctgttttgagccagacatgaagctgatacgcggcatacataatctcagccaggccccgcaagaagggtgtgtgctgactattggtaatttcgacggcgtgcatcgcggtcatcgcgcgctgttacagggcttgcaggaagaagggcgcaagcgcaacttaccggtgatggtgatgctttttgaacctcaaccactggaactgtttgctaccgataaagccccggcaagactgacccggctgcgggaaaaactgcgttaccttgcagagtgtggcgttgattacgtgctgtgcgtgcgtttcgacaggcgtttcgcggcgttaaccgcgcaaaatttcatcagcgatcttctggtgaagcatttgcgcgtaaaatttcttgccgtaggtgatgatttccgctttggcgctggtcgtgaaggcgatttcttgttattacagaaagctggcatggaatacggcttcgatatcaccagtacgcaaactttttgcgaaggtggcgtgcgcatcagcagcaccgccgtgcgtcaggcccttgcggatgacaatctggctctggcagagagtttactggggcacccgtttgccatctccgggcgtgtagtccacggtgatgaattagggcgcactataggtttcccgacggcgaatgtaccgctgcgccgtcaggtttccccggtgaaaggggtttatgcggtagaagtgctgggcctcggtgaaaagccgttacccggcgtggcaaacatcggaacacgcccaacggttgccggtattcgccagcagctggaagtgcatttgttagatgttgcaatggacctttacggtcgccatatacaagtagtgctgcgtaaaaaaatacgcaatgagcagcgatttgcgagcctggacgaactgaaagcgcagattgcgcgtgatgaattaaccgcccgcgaattttttgggctaacaaaaccggcttaagcctgttatgtaatcaaaccgaaatacggaaccgagaatctgatgagtgactataaaagtaccctgaatttgccggaaacagggttcccgatgcgtggcgatctcgccaagcgcgaacccggaatgctggcgcgttggactgatgatgatctgtacggcatcatccgtgcggctaaaaaaggcaaaaaaaccttcattctgcatgatggccctccttatgcgaatggcagcattcatattggtcacagcgttaacaagattctgaaagacattatcgtgaagtccaaagggctttccggttatgacagcccgtatgtgcctggctgggactgccacggtctgccgatcgagctgaaagtcgagcaagaatacggtaagccgggtgagaaattcaccgccgccgagttccgcgccaagtgccgcgaatacgcggcgacccaggttgacggtcaacgcaaagactttatccgtctgggcgtgctgggcgactggagccacccgtacctgaccatggacttcaaaactgaagccaacatcatccgcgcgctgggcaaaatcatcggcaacggtcacctgcacaaaggcgcgaagccagttcactggtgcgttgactgccgttctgcgctggcggaagcggaagttgagtattacgacaaaacttctccgtccatcgacgttgctttccaggcagtcgatcaggatgcactgaaagcaaaatttgccgtaagcaacgttaacggcccaatcagcctggtaatctggaccaccacgccgtggactctgcctgccaaccgcgcaatctctattgcaccagatttcgactatgcgctggtgcagatcgacggtcaggccgtgattctggcgaaagatctggttgaaagcgtaatgcagcgtatcggcgtgaccgattacaccattctcggcacggtaaaaggtgcggagcttgagctgctgcgctttacccatccgtttatgggcttcgacgttccggcaatcctcggcgatcacgttaccctggatgccggtaccggtgccgttcacaccgcgcctggccacggcccggacgactatgtgatcggtcagaaatacggcctggaaaccgctaacccggttggcccggacggcacttatctgccgggcacttatccgacgctggatggcgtgaacgtcttcaaagcgaacgacatcgtcgttgcgctgctgcaggaaaaaggcgcgctgctgcacgttgagaaaatgcagcacagctatccgtgctgctggcgtcacaaaacgccgatcatcttccgcgcgacgccgcagtggttcgtcagcatggatcagaaaggtctgcgtgcgcagagtctgaaagagatcaaaggcgtgcagtggatcccggactggggccaggcgcgtatcgagagcatggttgctaaccgtcctgactggtgtatctcccgtcagcgcacctggggtgtaccgatgagtctgttcgtgcacaaagacacggaagagctgcatccgcgtacccttgaactgatggaagaagtggcaaaacgcgttgaagtcgatggcatccaggcgtggtgggatctcgatgcgaaagagatcctcggcgacgaagctgatcagtacgtgaaagtgccggacacattggatgtatggtttgactccggatctacccactcttctgttgttgacgtgcgtccggaatttgccggtcacgcagcggacatgtatctggaaggttctgaccaacaccgcggctggttcatgtcttccctaatgatctccaccgcgatgaagggtaaagcgccgtatcgtcaggtactgacccacggctttaccgtggatggtcagggccgcaagatgtctaaatccatcggcaataccgttagcccgcaggatgtgatgaacaaactgggcgcggatattctgcgtctgtgggtggcaagtaccgactacaccggtgaaatggccgtttctgacgagatcctgaaacgtgctgccgatagctatcgtcgtatccgtaacaccgcgcgcttcctgctggcaaacctgaacggttttgatccagcaaaagatatggtgaaaccggaagagatggtggtactggatcgctgggccgtaggttgtgcgaaagcggcacaggaagacatcctcaaggcgtacgaagcatacgatttccacgaagtggtacagcgtctgatgcgcttctgctccgttgagatgggttccttctacctcgacatcatcaaagaccgtcagtacaccgccaaagcggacagtgtggcgcgtcgtagctgccagactgcgctatatcacatcgcagaagcgctggtgcgctggatggcaccaatcctctccttcaccgctgatgaagtgtggggctacctgccgggcgaacgtgaaaaatacgtcttcaccggtgagtggtacgaaggcctgtttggcctggcagacagtgaagcgatgaacgatgcgttctgggacgagctgttgaaagtgcgtggcgaagtgaacaaagtcattgagcaagcgcgtgccgacaagaaagtgggtggcagcctggaagcggcagtaaccttgtatgcagaaccggaactgagcgcgaaactgaccgcgctgggcgatgaattacgatttgtcctgttgacctccggcgctaccgttgcagactataacgacgcacctgctgatgctcagcagagcgaagtactcaaagggctgaaagtcgcgttgagtaaagccgaaggtgagaagtgcccacgctgctggcactacacccaggatgtcggcaaggtggcggaacacgcagaaatctgcggccgctgtgtcagcaacgtcgccggtgacggtgaaaaacgtaagtttgcctgatgagtcaaagcatctgtagtacagggctacgctggctgtggctggtggtagtcgtgctgattatcgatctgggcagcaaatacctgatcctccagaactttgctctgggggatacggtcccgctgttcccgagccttaatctgcattatgcgcgtaactatggcgcggcgtttagtttccttgccgatagcggcggctggcagcgttggttctttgccggtattgcgattggtattagcgtgatcctggcagtgatgatgtatcgcagcaaggccacgcagaagctaaacaatatcgcttacgcgctgattattggcggcgcgctgggcaacctgttcgaccgcctgtggcacggcttcgttgtcgatatgatcgacttctacgtcggcgactggcacttcgccaccttcaaccttgccgatactgccatctgtgtcggtgcggcactgattgtgctggaaggttttttgccttctagagcgaaaaaacaataataaaccctgccggatgcgatgctgacgcatcttatccggcctacagattgctgcgaaatcgtaggccggataaggcgtttacgccgcatccggcaaaaatccttaaatataagagcaaacctgcatgtctgaatctgtacagagcaatagcgccgtcctggtgcacttcacgctaaaactcgacgatggcaccaccgccgagtctacccgcaacaacggtaaaccggcgctgttccgcctgggtgatgcttctctttctgaagggctggagcaacacctgttggggctgaaagtgggcgataaaaccaccttcagcttggagccagatgcggcgtttggcgtgccgagtccggacctgattcagtacttctcccgccgtgaatttatggatgcaggcgagccagaaattggcgcaatcatgctttttaccgcaatggatggcagtgagatgcctggcgtgatccgcgaaattaacggcgactccattaccgttgatttcaaccatccgctggccgggcagaccgttcattttgatattgaagtgctggaaatcgatccggcactggaggcgtaacatgcagatcctgttggccaacccgcgtggtttttgtgccggggtagaccgcgctatcagcattgttgaaaacgcgctggccatttacggcgcaccgatatatgtccgtcacgaagtggtacataaccgctatgtggtcgatagcttgcgtgagcgtggggctatctttattgagcagattagcgaagtaccggacggcgcgatcctgattttctccgcacacggtgtttctcaggcggtacgtaacgaagcaaaaagtcgcgatttgacggtgtttgatgccacctgtccgctggtgaccaaagtgcatatggaagtcgcccgcgccagtcgccgtggcgaagaatctattctcatcggtcacgccgggcacccggaagtggaagggacaatgggccagtacagtaacccggaagggggaatgtatctggtcgaaagcccggacgatgtgtggaaactgacggtcaaaaacgaagagaagctctcctttatgacccagaccacgctgagcgtggatgacacgtctgatgtgatcgacgcgctgcgtaaacgcttcccgaaaattgtcggtccgcgcaaagatgacatctgctacgccacgactaaccgtcaggaagcggtacgcgccctggcagaacaggcggaagttgtgttggtggtcggtagcaaaaactcctccaactccaaccgtctggcggagctggcccagcgtatgggcaaacgcgcgtttttgattgacgatgcgaaagacatccaggaagagtgggtgaaagaggttaaatgcgtcggcgtgactgcgggcgcaagcgctccggatattctggtgcagaatgtggtggcgcgtttgcagcagctgggcggtggtgaagccattccgctggaaggccgtgaagaaaacattgttttcgaagtgccgaaagagctgcgtgtcgatattcgtgaagtcgattaagtcattagcagcctaagttatgcgaaaatgccggtcttgttaccggcattttttatggagaaaacatgcgtttacctatcttcctcgatactgaccccggcattgacgatgccgtcgccattgccgccgcgatttttgcacccgaactcgacctgcaactgatgaccaccgtcgcgggtaatgtcagcgttgagaaaactacccgcaatgccctgcaactgctgcatttctggaatgcggagattccgctcgcccaaggggccgctgtgccactggtacgcgcaccgcgtgatgcggcatctgtgcacggcgaaagcggaatggctggctacgactttgttgagcacaaccgaaagccgctcgggataccggcgtttctggcgattcgggatgccctgatgcgtgcaccagagcctgttaccctggtggccatcggcccgttaaccaatattgcgctgttacttagtcaatgcccggaatgcaagccgtatattcgccgtctggtgatcatgggtggttctgccggacgcggcaactgtacgccaaacgccgagtttaatattgctgccgatccagaagctgctgcctgtgtcttccgcagtggtattgaaatcgtcatgtgcggtttggatgtcaccaatcaggcaatattaactcctgactatctctctacactgccgcagttaaaccgtaccgggaaaatgcttcacgccctgtttagccactaccgtagcggcagtatgcaaagcggcttgcgaatgcacgatctctgcgccatcgcctggctggtgcgcccggacctgttcactctcaaaccctgttttgtggcagtggaaactcagggcgaatttaccagtggcacgacggtggttgatatcgacggttgcctgggcaagccagccaatgtacaggtggcattggatctggatgtgaaaggcttccagcagtgggtggctgaggtgctggctctggcgagctaacctgtcacatgttattggcatgcagtcattcatcgactcatgcctttcactgatatccctccctgtttatcattaatttctaattatcagcgtttttggctggcggcgtagcgatgcgctggttactctgaaaacggtctatgcaaattaacaaaagagaatagctatgcatgatgcaaacatccgcgttgccatcgcgggagccggggggcgtatgggccgccagttgattcaggcggcgctggcattagagggcgtgcagttgggcgctgcgctggagcgtgaaggatcttctttactgggcagcgacgccggtgagctggccggagccgggaaaacaggcgttaccgtgcaaagcagcctcgatgcggtaaaagatgattttgatgtgtttatcgattttacccgtccggaaggtacgctgaaccatctcgctttttgtcgccagcatggcaaagggatggtgatcggcactacggggtttgacgaagccggtaaacaagcaattcgtgacgccgctgccgatattgcgattgtctttgctgccaattttagcgttggcgttaacgtcatgcttaagctgctggagaaagcagccaaagtgatgggtgactacaccgatatcgaaattattgaagcacatcatagacataaagttgatgcgccgagtggcaccgcactggcaatgggagaggcgatcgcccacgcccttgataaagatctgaaagattgcgcggtctacagtcgtgaaggccacaccggtgaacgtgtgcctggcaccattggttttgccaccgtgcgtgcaggtgacatcgttggtgaacataccgcgatgtttgccgatattggcgagcgtctggagatcacccataaggcgtccagccgtatgacatttgctaacggcgcggtaagaagcgctttgtggttgagtggtaaggaaagcggtctttttgatatgcgagatgtacttgatctcaataatttgtaaccacaaaatatttgttatggtgcaaaaataacacatttaatttattgattataaagggctttaatttttggcccttttatttttggtgttatgtttttaaattgtctataagtgccaaaaattacatgttttgtcttctgtttttgttgttttaatgtaaattttgaccatttggtccacttttttctgctcgtttttatttcatgcaatcttcttgctgcgcaagcgttttccagaacaggttagatgatctttttgtcgcttaatgcctgtaaaacatgcatgagccacaaaataatataaaaaatcccgccattaagttgacttttagcgcccatatctccagaatgccgccgtttgccagaaattcgtcggtaagcagatttgcattgatttacgtcatcattgtgaattaatatgcaaataaagtgagtgaatattctctggagggtgttttgattaagagtgcgctattggttctggaagacggaacccagtttcacggtcgggccataggggcaacaggtagcgcggttggggaagtcgttttcaatactagtatgaccggttatcaagaaatcctcactgatccttcctattctcgtcaaatcgttactcttacttatccccatattggcaatgtcggcaccaatgacgccgatgaagaatcttctcaggtacatgcacaaggtctggtgattcgcgacctgccgctgattgccagcaacttccgtaataccgaagacctctcttcttacctgaaacgccataacatcgtggcgattgccgatatcgatacccgtaagctgacgcgtttactgcgcgagaaaggcgcacagaatggctgcattatcgcgggcgataacccggatgcggcgctggcgttagaaaaagcccgcgcgttcccaggtctgaatggcatggatctggcaaaagaagtgaccaccgcagaagcctatagctggacacaagggagctggacgttgaccggtggcctgccagaagcgaaaaaagaagacgagctgccgttccacgtcgtggcttatgattttggtgccaagcgcaacatcctgcggatgctggtggatagaggctgtcgcctgaccatcgttccggcgcaaacttctgcggaagatgtgctgaaaatgaatccagacggcatcttcctctccaacggtcctggcgacccggccccgtgcgattacgccattaccgccatccagaaattcctcgaaaccgatattccggtattcggcatctgtctcggtcatcagctgctggcgctggcgagcggtgcgaagactgtcaaaatgaaatttggtcaccacggcggcaaccatccggttaaagatgtggagaaaaacgtggtaatgatcaccgcccagaaccacggttttgcggtggacgaagcaacattacctgcaaacctgcgtgtcacgcataaatccctgttcgacggtacgttacagggcattcatcgcaccgataaaccggcattcagcttccaggggcaccctgaagccagccctggtccacacgacgccgcgccgttgttcgaccactttatcgagttaattgagcagtaccgtaaaaccgctaagtaatcaggagtaaaagagccatgccaaaacgtacagatataaaaagtatcctgattctgggtgcgggcccgattgttatcggtcaggcgtgtgagtttgactactctggcgcgcaagcgtgtaaagccctgcgtgaagagggttaccgcgtcattctggtgaactccaacccggcgaccatcatgaccgacccggaaatggctgatgcaacctacatcgagccgattcactgggaagttgtacgcaagattattgaaaaagagcgcccggacgcggtgctgccaacgatgggcggtcagacggcgctgaactgcgcgctggagctggaacgtcagggcgtgttggaagagttcggtgtcaccatgattggtgccactgccgatgcgattgataaagcagaagaccgccgtcgtttcgacgtagcgatgaagaaaattggtctggaaaccgcgcgttccggtatcgcacacacgatggaagaagcgctggcggttgccgctgacgtgggcttcccgtgcattattcgcccatcctttaccatgggcggtagcggcggcggtatcgcttataaccgtgaagagtttgaagaaatttgcgcccgcggtctggatctctctccgaccaaagagttgctgattgatgagagcctgatcggctggaaagagtacgagatggaagtggtgcgtgataaaaacgacaactgcatcatcgtctgctctatcgaaaacttcgatgcgatgggcatccacaccggtgactccatcactgtcgcgccagcccaaacgctgaccgacaaagaatatcaaatcatgcgtaacgccagcatggcggtgctgcgtgaaatcggcgttgaaaccggtggttccaacgttcagtttgcggtgaacccgaaaaacggtcgtctgattgttatcgaaatgaacccacgcgtgtcccgttctagcgcgctggcgagcaaagcgaccggtttcccgattgctaaagtggcggcgaaactggcggtgggttacaccctcgacgaactgatgaacgacatcactggcggacgtactccggcctccttcgagccgtccatcgactatgtggttactaaaattcctcgcttcaacttcgaaaaattcgccggtgctaacgaccgtctgaccactcagatgaaaagcgttggcgaagtgatggcgattggtcgcacgcagcaggaatccctgcaaaaagcgctgcgcggcctggaagtcggtgcgactggattcgacccgaaagtgagcctggatgacccggaagcgttaaccaaaatccgtcgcgaactgaaagacgcaggcgcagatcgtatctggtacatcgccgatgcgttccgtgcgggcctgtctgtggacggcgtcttcaacctgaccaacattgaccgctggttcctggtacagattgaagagctggtgcgtctggaagagaaagtggcggaagtgggcatcactggcctgaacgctgacttcctgcgccagctgaaacgcaaaggctttgccgatgcgcgcttggcaaaactggcgggcgtacgcgaagcggaaatccgtaagctgcgtgaccagtatgacctgcacccggtttataagcgcgtggatacctgtgcggcagagttcgccaccgacaccgcttacatgtactccacttatgaagaagagtgcgaagcgaatccgtctaccgaccgtgaaaaaatcatggtgcttggcggcggcccgaaccgtatcggtcagggtatcgaattcgactactgttgcgtacacgccagcctggcgctgcgcgaagacggttacgaaaccattatggttaactgtaacccggaaaccgtctccaccgactacgacacttccgaccgcctctacttcgagccggtaactctggaagatgtgctggaaatcgtgcgtatcgagaagccgaaaggcgttatcgtccagtacggcggtcagaccccgctgaaactggcgcgcgcgctggaagctgctggcgtaccggttatcggcaccagcccggatgctatcgaccgtgcagaagaccgtgaacgcttccagcatgcggttgagcgtctgaaactgaaacaaccggcgaacgccaccgttaccgctattgaaatggcggtagagaaggcgaaagagattggctacccgctggtggtacgtccgtcttacgttctcggcggtcgggcgatggaaatcgtctatgacgaagctgacctgcgtcgctacttccagacggcggtcagcgtgtctaacgatgcgccagtgttgctggaccacttcctcgatgacgcggtagaagttgacgtggatgccatctgcgacggcgaaatggtgctgattggcggcatcatggaacatattgagcaggcgggcgtgcactccggtgactccgcatgttctctgccagcctacaccttaagtcaggaaattcaggatgtgatgcgccagcaggtgcagaaactggccttcgaattgcaggtgcgcggcctgatgaacgtgcagtttgcggtgaaaaacaacgaagtctacctgattgaagttaacccgcgtgcggcgcgtaccgttccgttcgtctccaaagccaccggcgtaccgctggcaaaagtggcggcgcgcgtgatggctggcaaaagcctggctgagcagggcgtaaccaaagaagttatcccgccgtactacagcgtgaaagaagtggtgctgccgttcaataaattcccgggcgttgacccgctgttagggccagaaatgcgctctaccggggaagtcatgggcgtgggccgcaccttcgctgaagcgtttgccaaagcgcagctgggcagcaactccaccatgaagaaacacggtcgtgcgctgctttccgtgcgcgaaggcgataaagaacgcgtggtggacctggcggcaaaactgctgaaacagggcttcgagctggatgcgacccacggcacggcgattgtgctgggcgaagcaggtatcaacccgcgtctggtaaacaaggtgcatgaaggccgtccgcacattcaggaccgtatcaagaatggcgaatatacctacatcatcaacaccaccagtggccgtcgtgcgattgaagactcccgcgtgattcgtcgcagtgcgctgcaatataaagtgcattacgacaccaccctgaacggcggctttgccaccgcgatggcgctgaatgccgatgcgactgaaaaagtaattagcgtgcaggaaatgcacgcacagatcaaataatagcgtgtcatggcagatatttttcatccgctaatttgatcgaataactaatacggttctctgatgaggaccgtttttttttgcccattaagtaaatcttttggggaatcgatatttttgatgacataagcaggatttagctcacacttatcgacggtgaagttgcatactatcgatatatccacaattttaatatggccttgtttaattgcttcaaaacgagtcatagccagacttttaatttgtgaaactggagttcgtatgtgtgaaggatatgttgaaaaaccactctacttgttaatcgccgaatggatgatggctgaaaatcggtgggtgatagcaagagagatctctattcatttcgatattgaacacagcaaggcggttaataccctgacttatattctgagcgaagtcacagaaataagctgcgaagttaagatgatccctaataagctggaagggcggggatgccagtgtcagcgactggttaaagtggtcgatatcgatgagcaaatttacgcgcgcctgcgcaataacagtcgggaaaaattagtcggtgtaagaaagacgccgcgtattcctgccgttccgctcacggaacttaaccgcgagcagaagtggcagatgatgttgagtaagagtatgcgtcgttaattttatctcgttgataccgggcgtcctgcttgccagatgcgatgttgtagcatcttatccagcaaccaggtcgcatccggcaagatcaccgtttaggcgtcacatccgtcgtcccctgcaaacgggggcgattttcctccatttgcctcagtggctgcgtttcatgtaagcttacatgacagcgcccgacaagatcctgatactctttggtattcaaccgtttccagtgtaactcgtcgtcactaacattgcgtacagcgcgggctggcgtacccatcaacaactggcgtttctcgccgcgaaagcccgctttgacaaagctcatggcggcaacaatgctctcttcgccaatgaccgcgccatccataatcacgctgttcatcccgaccaatgcatcgcgaccaatcaaacaaccatgcaggatcgctccgtgcccgatatggccgttttccccaacgatagtgtcagtgtcgcagtagccatgcataatgcagccatcctgaatattggctcccgcttgcacgatcaaccgcccgtagtcaccacgcagactggcgagtgggccgatgtagacaccggctcccacaatcacatcgccaatcaagacggcactgggatggacaaacgccgtcgggtgaaccaccggaattaacccctcaaaggcgtaatagctcacggttgttaacgtcctttccacaccggatcgcgcttctcggcaaacgccagcggcccttcaatggcatcttcgctatgcagaacgcttggatagtgtttcaacacgccgctgcgaatatagcgatacgcttcttctaccggcatttcgctggtggtgcggtagatctctttcagcgccgcaatcgccagcggggcgctgttaaccagctgctgagccagttcgcgggcgttatccatcagttccgcctggctaaccacgcggttgactatcccccaacgcagcgcctcttctgcgcccattcgtctgccggtcatcaccatttcattgacgatggcaggcggcaggatcttcggcagacgcagcacaccgccgctgtcaggaacgatgcccagtttggcttccggcagggcgaagctggcgttatcggcacaaacaataaaatctgccgccagcgccagttcaaagccgccgccaaaggcatagccgttcacagctgcgataaccggtttgtcgagattgaaaatttcggttaatcccgcaaaaccacccggaccaaagtcagcatccggtgcttcgccttctgctgccgcttttaaatcccagcccgcggaaaagaacttctctccggcaccggtaataatggcgacacgtaattgcggatcgtcacggaaatttagaaatacttcgcccatttcaaagctggtttttgcatcaatagcattcgcttttggacgatcaagggtaatttccagaatacttccattgcgggtcagatgtaaactttcactcattccttttctccatttttgctttttcagggagctcaacatccctgcaaaaaatgcatattgttttagagtgtgattattagctggcagggtagttccctgctgtttcatttatttcagattctttctaattattttcccgctgcaattacgtggcagatcttttctgatctccagataagagggcactttaaatttcgccatattttgttcgcagaagcggaaaaattcctcttcgctcaatgtttcaccttcattcagcaccacaaatgctttgatggcttcatcgcgaatgctatctttaatacccacaaccacgatgtcctgaattttcgggtgcgcggcgataatattttccagctccacgcaggagacattctcgccgccacgtttaatcatattgcagcggcgatcgacgaaataaaaaaagtcctcttcgtcgcggtatccggtatcgccggtatgcagccagccatcggcttccagcactttcgcagtggcttgtgggttgagaaagtactctttgaagatggttttcccaggtatgcctttaatgcagatttcaccgatctcaccagccgggagcgggcgattgtgatcgtcgcggatctccgcttcgtagcaaaaccccacccgaccaatgctcggccagcgtcgtttatcgccaggacgatcgccgataatgcccacaatggtttccgtcatcccataagacgtcagcaagcgaacgccgaagcgttcacaaaacgcatctttttcctgctcgctcaagttgagataaaacatcacttcccgcaggcggtgttgctgatcgttcgcactaggcggctgtaccatcaacgtacggatcatcatcggaatacattcggtaacggtggcgcggtacttctgtacctgtccccagaaggcgcgggcgctgtatttctcgaccagcacaaaggtggccccggcagaaaacgccgccatcgccgcagtacactggcaatcgatatgaaacgcaggcattaccgtcaggtagacgtcatcgtcacgcagtgcacactgccaggcggagtaatatccagcgaagcgcaggttgtaatgggtaatcaccacacctttcggtcgggaggtggtgccggaggtgaagagaatttccgccgtatcgtcagtgcttagcggcggtgcatagcacaaggtggcaggttgttgatttttcagttgagtaaagctactcacgccatcatcagcgggaagtgccacatctgtcaggcaaatgtgccgcaattgagtggcatcttcctgctgaatctgttgatacataggatagaattgcgcactggtcaccagcaggcacgcctggctattttgcaggatccacgcgctttccttgcacaacaggcgggcgttaatcggcaccataatcgcgccaatttttgccagcccgaaccagcaaaagataaattccgggcagttgtcgagatgtagtgcaaccttgtcgcctttgcgaatccccagcgtataaaacaggtttgccgtgcggttaatctcctgatttaactcaagataactataccggttaacgactccgccgctggattcacaaatcagcgccgttttatgaccgtaaacgtccgcaagatcgtcccacatttgacgtagatgttgtccgccaatgatatccattgcacctctatccatttttgttcgtttgttattgggcgggcgctagtcaggcaagccgactgacgccacgcgtttagtcctcaactttggccagacctttgctgaccaactcctgaatgtcgttttcgctgtagccgatatttttcaaaatggcagccgtgtccataccatgactgggcattccgcgccagatttgtccggggttatttttgaatttcggcatgatgttcggccctttgcaggtgcgaccatccatcgtttgccactgagtgatactttcgcgagccacatactgtggattgctttccagttccggtacggtcagcactttggcgcaggcgatattcagttcagcaaagcgttcttttacttccgcgatggtatgtgtcgccagccaggcatcgagtttctcttcaaccagtgggccgtaagggcattcgatacggtggataagctgagtgccttccgggatttctggcgtgccaagcagatgtgcgaggccaatatctttaaagcactcttcaatttgggtaatgcccaccagttccatcacgatgtagccgtcggcacatttatacagaccgcaaccggcgtagtagggatctttacctttgctcatgcgcgggcacatttcgccgccgttgaagtaatccatcatgaagtactggcccatacgcagcatcacttcatacatggcgatgtcgatactttcgcctttaccggtttcacgcactttatgcagtgctgccagcgccgccgtggtggcggtcaggccagaaaagtaatcggcggtatacgggaaggcaggcattggctggtcaacatcaccgttctgaatcaggtaaccactaaaggcctgggcgatagtgttataggccggaagattggtgtactcctcggtgccgtactgaccaaaaccggacaggtgagcgataaccagtttcgggttgtgctgccacagtacttcatcggtaatgccacgacgggcaaaggccggacctttactggcttcgatgaagatatcggtggtttccattaatttcagaaacgcttcgcggccttcatctttgaaaatatttaagctcagcgcgtgcaaattgcggcgggagagttgcgggtagttcggttgaacgcgaatggtgtcggcccaggcgacgttctcgatccagataacttccgcgccccattctgcgaacatttgcccggcaaacggtccggcgatttcgataccggagaagacaacgcgcaatccggccaacggcccgaatttcggcatgggtagatgatccattatttgctcctgaaaaatttatgtagcgcatgactgccggatgcggcgtaaacgctttatccggcctacattcgtgctcccgtaggcctgataagacgcatcagcgtcgcatcaggcagcgcacggacttagcggtattgcttcagcaccgcacgacccagcgtcaggatctgcatttcgtcagatcccccggagacgcggtctacacgcagatcacgccagaagcggctgatgcggtggttgcccgcaatcccgacaccgcccagcacctgcattgcgctatccacaacttcaaatgccgcattggcgcagaagtatttgcacatcgctgcatcgccagaggtgatggtgccgttgtctgctttccacgctgcttcatacagcatgtttttcatggagtttaatttgatcgccatgtgggcgaatttttcctgaatcaactggaaacgaccaatagcctcgccaaactgcacgcgctgattggcgtagcgcgccgcatcttcaaaggcgcacatcgccgtaccgtagttggtgagggctaccaggaaacgttcatggtcgaactcttctttgacgcggttaaagccgttaccttcccgaccgaacatgtctttctcgtccagttccacgtcgtcaaaggtgatttcacagcagctatccatacgcagaccgagcttttcaagtttggtcactttgatgcccggtttgctcatatcaacaaaccattcggtgtagacaggtttgtccggagaagccccgtcgcgcgccatcaccacgatgtacggggtgtaggcgctgctggtaataaaacacttactaccattaagataaatcttaccatttctacgggtataagtcgttttcaggctacccacgtcggagcccgcgcccggttcggtaatcgcactgttccacatctgcttaccggtgccgcggaaagccataattttgtcgatctgctcttgtgtgccttcgcgcaggaaggtgttgaacccgcccggcaactggtacagcacataggttggtgcccccagacgtcccagctccatccacacggcggcgagagtaacaaaccccgcgtccagaccaccgtgctcttcagggatcagcagactgtcgatacccatatccgccagtgctttgacaaaacgttccgggtagacgctgtcacggtcgcactcggcaaaataggcctcccagttttcgctggccatcagttcgcggataccggcgacaaacagttcctgctcatcatttaaattaaaatccatctttcaacctcttgatattttgggggttaattaatctttccagttctgtttcgcgtctttaataaaggagagcgtcaccataatgttgacgaagaacagcgggcatcctccggcgataatggcggtttgaatcggtttcaggccgccgagcgccagcagaacaataccgataatgccaaccagaatactccaaccgatacgcaccagcagaggtggttcttcaccatcgcgtacttcgcggcaagtggacatcgccagggtataagagcaggcgttaaccagcgtaacggtggcaataaagcagaggatgaagaagccccacatggtggcggtgctgagtggcagagcggcccaggtttcaatgatggcgcgcgccacaccgtactgttcgatcagatttggaatgttgatgatgtttttatctatcaacagcagagtgttactaccgagtacagtccacaggatccaggtactcgctgtcagccccagcaccatgccgaagcacagttcacgcacagtacgaccacgggagatgcgggcgaggaagatactcatctggatagcataaatcacccaccatgcccagtagaacacggtccagccctgcgggaagccgcctttagcgatgggatcggtatagaacaacatgcgcggcagatacatcagcaacatccccacgctatcggtgaagtagttcatgatgaagctggcaccgctgacaatgaacacccaacccagcatcaggaagctcaggtaactacgcacgtcactggcgatacgtacccctttttgcagaccgcaagcgacgcaaatggcgttgaggataatccagcaggtaatgatgatagcgtccagttgcagggtatgcggaatgccaaacaaccattgcatacactcggtcaccagcggcgtggcaaggcccagactggtacccatcgcgaagatcaaggcgacgagatagaagttgtcgacgatagtgccgaacaaccctttggcgtgtttttcacctaccagcggcaccagtgtgctgctggggcgaatcacttccattttgcggacaaagaagaagtaagcgaaggcgacactaaggaagctgtaagtggcccacggcagaggtccccagtggaacaagctgtaagccagccccaactctttcgcccctgtgctgttcggttctaagccaaacggcggggtggagatgtagtagtagatctcaatgcttccccagaacagtacggcagcagacgtacaggaggcgaacatcataaagatccaactggcggtgctaaattctggcggttcgttacctaaacgctttttggcatacgggccaaacaccagccagaaccaaccgaaaagcatcaccaccatataccattcaaatgcccatccccatacattggtgacgtaactgaatacagcattaataacgacattcgctgcatccagatctctgactgtaagccaacaaagtatgccgacgattattaacggcggaaagaaaaccttcggttctattcccgtttttctcttttcattcttcatgagttaattccactgtgaaaacgaatatttattttgcgttcccgtttgttttatttttgttaacatttaatataattattattaacctcgtggacgcgttaatggctaactcataatgggtattcaataagctgtattctgtgattggtatcacatttttgtttcgggtgaatagagggcgttttttcgttaattttgattaataatcagtttgttatgctctgttgtgagtaaaaaataacatctgactttcaatattggtgatccataaaacaatattgaaaatttctttttgctacgccgtgttttcaatattggtgaggaacttaacaatattgaaagttggatttatctgcgtgtgacattttcaatattggtgattaaagttttatttcaaaattaaagggcgtgatatctgtaattaacaccaccgatatgaacgacgtttccttcatgatttctggagatgcaatgaagattattacttgctataagtgcgtgcctgatgaacaggatattgcggtcaataatgctgatggtagtttagacttcagcaaagccgatgccaaaataagccaatacgatctcaacgctattgaagcggcttgccagctaaagcaacaggcagcagaggcgcaggtgacagccttaagtgtgggcggtaaagccctgaccaacgccaaagggcgtaaagatgtgctaagccgcggcccggatgaactgattgtggtgattgatgaccagttcgagcaggcactgccgcaacaaacggcgagcgcactggctgcagccgcccagaaagcaggctttgatctgatcctctgtggcgatggttcttccgacctttatgcccagcaggttggtctgctggtgggcgaaatcctcaatattccggcagttaacggcgtcagcaaaattatctccctgacggcagataccctcaccgttgagcgcgaactggaagatgaaaccgaaaccttaagcattccgctgcctgcggttgttgctgtttccactgatatcaactccccacaaattcctagcatgaaagccattctcggcgcggcgaaaaagcccgtccaggtatggagcgcggcggatattggttttaacgcagaggcagcctggagtgaacaacaggttgccgcgccgaaacagcgcgaacgtcagcgcatcgtgattgaaggcgacggcgaagaacagatcgccgcatttgctgaaaatcttcgcaaagtcatttaattacaggggatgctatgaacacgttttctcaagtctgggtattcagcgataccccttctcgtctgccggaactgatgaacggtgcgcaggctttagctaatcaaatcaacacctttgtcctcaatgatgccgacggcgcacaggcaatccagctcggcgctaatcatgtctggaaattaaacggcaaaccggacgatcggatgatcgaagattacgccggtgtcatggctgacactattcgccagcacggcgcagacggcctggtgctgctgccaaacacccgtcgcggcaaattactggcggcaaaactgggttatcgccttaaagcggcggtgtctaacgatgccagcaccgtcagcgtacaggacggtaaagcgacagtgaaacacatggtttacggtggtctggcgattggcgaagaacgcattgccacgccgtatgcggtactgaccatcagcagcggcacgttcgatgcggctcagccagacgcgagtcgcactggcgaaacgcacaccgtggagtggcaggctccggctgtggcgattacccgcacggcaacccaggcgcgccagagcaacagcgtcgatctcgacaaagcccgtctggtggtcagcgtcggtcgcggtattggcagcaaagagaacattgcgctggcagaacagctttgcaaggcgataggtgcggagttggcctgttctcgtccggtggcggaaaacgaaaaatggatggagcacgaacgctatgtcggtatctccaacctgatgctgaaacctgaactgtacctggcggtggggatctccgggcagatccagcacatggttggcgctaacgcgagccaaaccattttcgccatcaataaagataaaaatgcgccgatcttccagtacgcggattacggcattgttggcgacgccgtgaagatccttccggcgctgaccgcagctttagcgcgttgatccactctggcagggctgcattttggccctgccgctgacagggagctcttatgtccgaagatatctttgacgccatcatcgtcggtgcagggcttgccggtagcgttgccgcactggtgctcgcccgcgaaggtgcgcaagtgttagttatcgagcgtggcaattccgcaggtgccaagaacgtcaccggcgggcgtctctatgcccacagtctggaacacattattcctggtttcgccgactccgcccccgtagaacgcctgatcacccatgaaaaactcgcgtttatgacggaaaagagtgcgatgactatggactactgcaatggtgacgaaaccagcccatcccagcgttcttactccgttttgcgcagtaaatttgatgcctggctgatggagcaggccgaagaagcgggcgcgcagttaattaccgggatccgcgtcgataacctcgtacagcgcgatggcaaagtcgtcggtgtagaagccgatggcgatgtgattgaagcgaaaacggtgatccttgctgatggggtgaactccatccttgccgaaaaattggggatggcaaaacgcgtcaaaccgacggatgtggcggttggcgtgaaggaactgatcgagttaccgaagagcgttattgaagaccgttttcagttgcagggtaatcagggggcggcttgcctgtttgcgggaagtcccaccgatggcctgatgggcggcggcttcctttataccaatgaaaacaccctgagcctggggctggtttgtggtttgcatcatctgcatgacgcgaaaaaaagcgtgccgcaaatgctggaagatttcaaacagcatccggccgttgcaccgctgatcgcgggcggcaagctggtggaatattccgctcacgtagtgccggaagcaggcatcaacatgctgccggagttggttggtgacggcgtattgattgccggtgatgccgccggaatgtgtatgaacctcggttttaccattcgcggtatggatctggcgattgccgccggggaagccgcagcaaaaaccgtgcttagtgcgatgaaaagcgacgatttcagtaagcaaaaactggcggaatatcgtcagcatcttgagagtggtccgctgcgcgatatgcgtatgtaccagaaactaccggcgttccttgataacccacgcatgtttagcggctacccggagctggcggtgggtgtggcgcgtgacctgttcaccattgatggcagcgcgccggaactgatgcgcaagaaaatcctccgccacggcaagaaagtgggcttcatcaatctaatcaaggatggcatgaaaggagtgaccgttttatgacttctcccgtcaatgtggacgtcaaactgggcgtcaataaattcaatgtcgatgaagagcatccgcacattgttgtgaaggccgatgctgataaacaggcgctggagctgctggtgaaagcgtgccccgcaggtctgtacaagaagcaggatgacggcagtgtgcgcttcgattacgccggatgtctggagtgcggcacctgtcgcattctggggctggggagcgcgctggaacagtgggaatacccgcgcggcacctttggtgtggagttccgttacggctgatgttggtttgatacgtaacgccgcactgactctcattgcaaaaaacaggaataaccatgcaaccgtccagaaactttgacgatctcaaattctcctctattcaccgccgcattttgctgtggggaagcggtggtccgtttctggatggttatgtactggtaatgattggcgtggcgctggagcaactgacgccggcgctgaaactggacgctgactggattggcttgctgggcgcgggaacgctcgccgggctgttcgttggcacaagcctgtttggttatatttccgataaagtcggacggcgcaaaatgttcctcattgatatcatcgccatcggcgtgataagcgtggcgacgatgtttgttagttcccccgtcgaactgttggtgatgcgggtacttatcggcattgtcatcggtgcagattatcccatcgccaccagtatgatcaccgagttctccagtacccgtcagcgggcgttttccatcagctttattgccgcgatgtggtatgtcggcgcgacctgtgccgatctggtcggctactggctttatgatgtggaaggcggctggcgctggatgctgggtagcgcggcgatcccctgtttgttgattttgattggtcgattcgaactgcctgaatctccccgctggttattacgcaaagggcgagtaaaagagtgcgaagagatgatgatcaaactgtttggcgaaccggtggctttcgatgaagagcagccgcagcaaacccgttttcgcgatctgtttaatcgccgccattttccttttgttctgtttgttgccgccatctggacctgccaggtgatcccaatgttcgccatttacacctttggcccgcaaatcgttggtttgttgggattgggggttggcaaaaacgcggcactagggaatgtggtgattagcctgttctttatgctcggctgtattccgccgatgctgtggttaaacactgccggacggcgtccattgttgattggcagctttgccatgatgacgctggcgctggcggttttggggctaatcccggatatggggatctggctggtagtgatggcctttgcggtgtatgcctttttctctggcgggccgggtaatttgcagtggctctatcctaatgaactcttcccgacagatatccgcgcctctgccgtgggcgtgattatgtccttaagtcgtattggcaccattgttagcacctgggcactaccgatctttatcaataattacggtatcagtaacacgatgctaatgggggcgggtatcagcctgtttggcttgttgatttccgtagcgtttgccccggagactcgagggatgagtctggcgcagaccagcaatatgacgatccgcgggcagagaatggggtaaattgttcagatttctctcttttctgaatcaatattattgactataagccgcgtgaatatatgactacactttgtgggaaaacaaaggcgtaatcacgcgggctacctatgattcttataatttatgcgcatccgtatccgcatcattcccatgcgaataaacggatgcttgaacaggcaaggacgctggaaggcgtcgaaattcgctctctttatcaactctatcctgacttcaatatcgatattgccgccgagcaggaggcgctgtctcgcgccgatctgatcgtctggcagcatccgatgcagtggtacagcattcctccgctcctcaaactttggatcgataaagttttctcccacggctgggcttacggtcatggcggcacggcgctgcatggcaaacatttgctgtgggcggtgacgaccggcggcggggaaagccattttgaaattggtgcgcatccgggctttgatgtgctgagccagccgctacaggcgacggcaatctactgcgggctgaactggctgccaccgtttgccatgcactgcacctttatttgtgacgacgaaaccctcgaagggcaggcgcgtcactataagcaacgtctgctggaatggcaggaggcccatcatggataattaaggaatggcaggaggcccatcatggatagccatacgctgattcaggcgctgatttatctcggtagcgcagcgctgattgtacccattgcggtacgtcttggtctgggaagcgtacttggctacctgatcgccggctgcattattggcccgtgggggctgcgactggtgaccgatgccgaatctattctgcactttgccgagattggggtggtgctgatgctgtttattatcggcctcgaactcgatccacaaaggctgtggaagctgcgtgcggcagtgttcggctgtggcgcattgcagatggtgatttgcggcggcctgctggggctgttctgcatgttacttgggctgcgctggcaggtcgcggaattgatcggcatgacgctggcgctctcctctacggcgattgccatgcaggcgatgaatgaacgcaatctgatggtgacgcaaatgggtcgcagtgcctttgcggtgctgctgttccaggatatcgcggcgatcccgctggtggcgatgattccgctactggcaacgagcagtgccagcacgacgatgggcgcatttgctctcagcgcgttaaaagtggcgggtgcgctggtgctggtggtattgctggggcgctatgtcacgcgtccggcgctgcgttttgtagcccgctctggcttgcgggaagtgtttagtgccgtggcgttattcctcgtgtttggctttggtttgctgctggaagaggtcggcttgagcatggcgatgggcgcgtttctggcgggcgtactgctggcaagcagcgaataccgtcatgcgctggagagcgatatcgaaccatttaaaggtttgctgttggggctgtttttcatcggtgttggcatgagcatagactttggcacgctgcttgaaaacccattgcgcattgtcattttgctgctcggtttcctcatcatcaaaatcgccatgctgtggctgattgcccgaccgttgcaagtgccaaataaacagcgtcgttggtttgcggtgttgttagggcagggcagtgagtttgcctttgtggtatttggcgcggcgcagatggcgaatgtgctggagccggagtgggcgaaaagcctgaccctggcggtggcgctgagcatggcagcaacgccgattctgctggtgatcctcaatcgccttgagcaatcttctactgaggaagcgcgtgaagccgatgagatcgacgaagaacagccgcgcgtgattatcgccggattcggtcgttttgggcagattaccggacgtttactgctctccagcggggtgaaaatggtggtactcgatcacgatccggaccatatcgaaaccttgcgtaaatttggtatgaaagtgttttatggcgatgccacgcggatggatttactggaatctgccggagcggcgaaagcggaagtgctgattaacgccatcgacgatccgcaaaccaacctgcaactgacagagatggtgaaagaacatttcccgcatttgcagattattgcccgcgcccgcgatgtcgaccactacattcgtttgcgtcaggcaggcgttgaaaagccggagcgtgaaaccttcgaaggtgcgctgaaaaccgggcgtctggcactggaaagtttaggtctggggccgtatgaagcgcgagaacgtgccgatgtgttccgccgctttaatattcagatggtggaagagatggcaatggttgagaacgacaccaaagcccgcgcggcggtctataaacgcaccagcgcgatgttaagtgagatcattaccgaggaccgcgaacatctgagtttaattcaacgacatggctggcagggaaccgaagaaggtaaacataccggcaacatggcggatgaaccggaaacgaaacccagttcctaataaagagtgacgtaaatcacactttacagctaactgtttgtttttgtttcattgtaatgcggcgagtccagggagagagcgtggactcgccagcagaatataaaattttcctcaacatcatcctcgcaccagtcgacgacggtttacgctttacgtatagtggcgacaattttttttatcgggaaatctcaatgatcagtctgattgcggcgttagcggtagatcgcgttatcggcatggaaaacgccatgccgtggaacctgcctgccgatctcgcctggtttaaacgcaacaccttaaataaacccgtgattatgggccgccatacctgggaaagtatcggtcgtccgttgccaggacgcaaaaatattatcctcagcagtcaaccgggtacggacgatcgcgtaacgtgggtgaagagcgtggatgaagccatcgcggcgtgtggtgacgtaccagaaatcatggtgattggcggcggtcgcgtttatgaacagttcttgccaaaagcgcaaaaactgtatctgacgcatatcgacgcagaagtggaaggcgacacccatttcccggattacgagccggatgactgggaaagcgtattcagcgaattccacgatgctgatgcgcagaactctcacagctattgctttgagattctggagcggcggtaattttgtatagaatttacggctagcgccggatgcgacgccggtcgcgtcttatccggccttcctatatcaggctgtgtttaagacgccgccgcttcgcccaaatccttatgccggttgctcggctggacaaaatactgtttatcttcccagcgcaggcaggttaatgtaccaccccagcagcagccggtatccagcgcgtatataccttccggcgtacctttgccctccaggcttgcccagtgaccaaaggcgatgctgtattcttcagcgacagggccaggaatcgcaaaccacggtttcagtggggcaggggcctcttccgggctttctttgctgtacatatccagttgaccgttcgggaagcaaaaacgcatacgggtaaaagcgttggtgataaaacgcagtcttcccagcccccgcaattccggactccagttatttggcatatcgccgtacatggcatcaagaaagaagggataggagtcactgcttagcaccgcttctacatcgcgtgcgcactctttggcggtctgcagatcccactgcggcgtgatccctgcgtgggccatcaccagctttttctcttcgtcgatttgcagcagaggctggcgccgcagccagttaagcagctcgtcggcatccggcgcttccagcagcggtgtcaggcgatctttcggtttattgcggctgatcccggcaaataccgccagcagatgcagatcgtgattgcccagcaccagacgtacgctgtcgcctaaggatttcacatagcgcagaacatccaggctacccggcccgcgcgcgaccagatcgcccgtcagccagagggtatctttcccaggggtaaattctactttatgcagcaatgcgatcagttcatcgtaacaaccatgaacgtcgccaataaggtatgtcgccatattcttttaatgaatgagtgtgggaacggcgagtcggaatacgggaatgtcgatgctgaaagggacgccattttcatcgatcatttcgtagtgaccctgcatggtgcccagcggggtttcaatgattgcaccgctggtgtactggtactcttcgccaggcgcgataagtggctggacgccaaccactccttcgccctggacttcggtttcacggccattgccattggtgatcagccagtaacgccccaacaactgcactggcgctcgccccagattgcgtatggttacggtataagcaaaaacgtaacgttcattatcaggactagattgagcctcaatgtagacgctttgaacctgaatacacactcgggggctattgatcatcgttaactctcctgcaaaggcgcgttctccgccagatagttcgccatctggcaatattgcgcgacagagatattttccgctcgcatcgccgggtcgatccccattcccgttaacacctcgacgctaaacaggttgccgaggctgttacgaatggttttacgacgctggttaaaggcttcggtggtgatgcggctcaacacacgaacatctttaaccgggtgaggcatcgttgcatgaggaaccaggcgcacgacggcggaatccactttgggtggtggtgtaaaggcactcggcggtacttccagtaccgggatcacattgcaatagtattgcgccatgacgcttaatcgaccatacgctttgctgttcggtcctgcaaccagacgattcaccacctctttttgcaacataaagtgcatgtcggcaatggcatcagtatagctaaacagatggaacatcaacggcgtggagatgttataaggcaggttgccgaaaacacgcagcggctgacccattttctcggccagttcaccaaagttaaaggtcatcgcatcctgctgataaatcgtcagtttcgggcctaagaatggatgcgtttgcagacgtgccgccagatcgcggtcaagttcgatgaccgtcagctggtccagacgttcgccgaccggttcggtcaatgccgccagaccggggccgatttcgaccatcgcctggcccttttgcgggttaatggcagacacaatactgtcgatcacgaactgatcgttgagaaagttttgcccgaagcgtttacgggctaagtggccctggtggactcgattattcattgggtgttaacaatcattttgatggcgagattaagcgccgtaataaaactgccggcatcggctttgccacgtcccgccagttcaagcgcggtgccgtggtccacacttgtgcgaataaagggcaggcccagcgtaatgttcacaccgcgcccgaagccctggtattttagcacgggaagaccctgatcgtggtacatcgccagcacggcgtcggcgttatcaagatatttcggctgaaacagggtatcggcaggcagcggcccgttgagtttcatcccctgcgcccgcagctcattgagcaccggaataatggtgtctatctcttccgtacccatatgaccgccttcgcccgcgtgcggattcagcccgcagaccagaatgcgcggttcggcaataccaaatttggtccgcaaatcgtgatgcaaaatagcaatcacttcgtgcaaaagtgcaggggtgatagcgtctgcgatatcgcgcagcggtaaatgcgtcgttgccagcgccacgcgaagttcttcggtcgccagcatcatcaccacctttttcgcctggctacgctcttcgaaaaactcggtatgaccggtaaaaggaatgccagcgtcgttaataacgcctttatgcaccggacctgtgatcagcgcggcaaattcgccgttcagacaaccatcgcacgctcgcgccagcgtttccaccacataatgcccattttcaaccgctaactgccccgcagtgacaggtgcacgtagcgcgacaggaagtagcgttaatgtgcccgcagtttgcggttgtgcaggggagttgggggaataagggcggagggtgagcggcaaaccgagcatcgctgcccggttggtaaggagagtggcatcggcacaaacaaccagttcgaccggccactcacgctgtgcaagctggacaactaagtccgggccaatcccggcgggctcgccgggagtgatcacaacacgttgggttttaaccattagttgctcaggattttaacgtaggcgctggcacgttgttcctgcatccagcttgctgcttcttcgctgaacttacggttcatcagcatgcggtatgcacgatctttctgcgcagcgtcggttttatcgacattacgggtatccagcagttcgattaaatgccagccgaaactagagtgaaccggtgcactcatttgacctttgttcaggcgagtcagggcgtcacggaaggccggatcgaaaatatctggtgtagcccagccgagatcgccgccctggttagcagagcctggatcctgagagaactctttcgctgcggcagcaaaagtcgttttaccactcttgatatcagcagcaatctgttccagtttcacacgggcctgttcgtcagtcatgatcgggctcggtttcagcagaatatggcgagcatgaacttcggtcacgctgatatttttgctttcgccgcgcaggtcgttaactttcagaatatggaagccaacgccggaacgaatcgggccaacaatgtcgcctttcttcgcggtgcttaatgcctgggcgaagatcccgggcaactcctgaatacggccccagcccatctggccgccgttcagcgcctgctggtcggcagaatgagcaatcgccagcttaccgaaatcagcgccgttacgcgcctgatcgacaatggcgcgcgcctggctttccgcttcgttcacctgatcagaggtcgggttttccggcagcgggatcaggatgtggctcaggttcagctcagtgctggcgtcgttttggttacccacctgctgcgccagggattcgacttcctgcggcaggatggtgatgcgacgacgcacctcgttgttacgcacttcagagataatcatctctttgcggatctggttacgataggtgttgtagttcagtccatcgtaagccagacggctgcgcatctgatccagcgtcatgttgttctgtttcgcgatgttagcaatcgcctgatccagctgctcatcggagattttcactcccattttctgccccatctgcaggatgatttgatccatgatcaaacgttccatgatttggtggcgcagcgtcgcgtcatcaggaagttgctgccttgcctgagcagcgttcagttttacgctctgcattaatccatcaacgtcgctttccagcacgacgccgttattgacgacggctgcgactttatcgactacctggggggcagcgaaactggtattcgcgatcatggcgataccgagaagcagcgttttccagttcttcatactttttccatttcaattaaccgcactgcggattacgtggtaaatcaacaaatcacaaagtgttttgatacggcagaatgttgctacgcagcatctcttgcgtacccagaccgtagttggagctcaggccgcgaagttcgatgttaaagccgattgcgttgtcatataccgcatgttgtttatcgttatcccaaccgttcagcttccgctcgtaaccgacgcgaattgcatagcagcaggagctgtattgcacacctaacatagagtcggcttgcttgttagcattggtgtcgtagtagtaggccccaacaatggaccaacgatcggcaattggccagctggcgacagcacctacctggctaataccattcttatattgctcagcagtggaatagtacttaggcagcgtagcctgaatatattccgggctggcgtaacggtaattcagctgtaccagacggtcttcatcccgacggtattcaatgctggagttactggtcgctacgttatccagacgtgtatcgtactgaatcccgccacgcaatccccaacgctcggagatacgccagtaagtatcgcctgcccacaccagactacccgttttgtcgtcattctcccatgttatgttgtcatcgccagtgcgagactccgtgaaatagtagatttgaccaacggaaatattaaaacgttcaacggcagcatcatcatatatgcgagatgtgacaccggtcgtcacctggttagcggaggcaatacggtcaagaccgccgtaagtccggtcccggaacaggccagagtagtcagattgcagcagagagctgtcgtagttatagatgtcgctctgatcgcgatacggcacgtacaaatactgcgcgcgcggttccagcgtttgggtataacccggagccagcatttccatatcgcgttcaaagaccattttgccgtcaactttgaattgcggcattacgcggttaacggattcgtccagcttggtcgtgtttctggagttataccagtcaagattggtttgctgataatgggttgccagcaacttcgcttcggtattgatgctgccccagttattagagagcggcaaattgatggtcggttccaggtgaacacgggttgcttcaggcatgtcgtctctggtgttaacaaagtgcactgcctggccgtaaatacgcgtatcaaacggaccaacatcattctggtagtaattaacgtctaactgcggctctgcgctgtagctactggtgttctgttcgctgaaaacctggaactgcttggtactaacggtggcattgaagttttgcaccgcatagccaacgctgaatttttgcgttgcgtagccgtcagtactggaaccgtacttgttatcgaaatcattgaagtagctaggatcgctgaccttggtgtagtcgacgttgaaacgccacacctgatccatgaccccggagtggttccagtagaataaccaacgacgactactgtcatcgttcgggtgttcatcttcatagactttatcactaggcagatagtccagttccatcaagccagcgcccgcctgggagaggtagcggaattcgttctcccacatgatgttgccacgacgatgcatataatgcggcgtgatggtggcatccatatttggcgcgatgttccagtaatatggcaggtagaactcaaagtagttggtggtggtgtacttggcgttcgggatcaagaaaccagagcgacgtttgtcacccaccggcaactgcaaataggggctataaaagatcggtaccggacccaccttaaagcgggcgttccagatctccgcaacttgttcttcgcggtcatgaataatttcgctacctaccacgctccaggtgtcagaacccggcagacaggaggtaaagctaccgttatccagaatggtatagcggttttcgccacgttgtttcatcaggtccgctttaccgcgaccctggcgacccaccatctggtaatcaccttcccagacgttggtatctttggtgttcagattcgcccagcctttcggccctttgaggatcacctggttatcgtcgtaatggacattaccgagcgcatcaacggtacgtaccggctccggttgtcctggtgcctctttttgatggagctgcacttcgtcggcctgcagacggctgttaccctgcatgatatccacgctgccagtaaacacggcgtcatccgggtagtcccctttcgcgtggtcagcattgatagtcacgggtaagtcattggtatcgccctgtaccagaggacggtcatagcttggcacgcccaacatgcactgactggcgaggtcggctgccagtccctgttgactataaagggcggtggcaatcatggtggccaggagagtggggatacgttttttcatacgttgattttattgttccatcatcggtaacgttgcgcgtgacaaacggtcagagactaacgtactcgtcatctctacgctagtgttaatcctgtccgaatagcgtcagtggtgttaggcacggcattgaatgacaggtatgataatgcaaattataggcgatgtcccacaattgaccgcagccggaaaacggtaaaagcacctttatattgtgggagatagccctgatatccgtgtgtcgatttggggaatatatgcagtattggggaaaaatcattggcgtggccgtggccttactgatgggcggcggcttttggggcgtagtgttaggcctgttaattggccatatgtttgataaagcccgtagccgtaaaatggcgtggttcgccaaccagcgtgagcgtcaggcgctgttttttgccaccacttttgaagtgatggggcatttaaccaaatccaaaggtcgcgtcacggaggctgatattcatatcgccagccagttgatggaccgaatgaatcttcatggcgcttcccgtactgcggcgcaaaatgcgttccgggtgggaaaaagtgacaattacccgctgcgcgaaaagatgcgccagtttcgcagtgtctgctttggtcgttttgacttaattcgtatgtttctggagatccagattcaggcggcgtttgctgatggtagtctgcacccgaatgaacgggcggtgctgtatgtcattgcagaagaattagggatctcccgcgctcagtttgaccagtttttgcgcatgatgcagggcggtgcacagtttggcggcggttatcagcagcaaactggcggtggtaactggcagcaagcgcagcgtggcccaacgctggaagatgcctgtaatgtgctgggcgtgaagccgacggatgatgcgaccaccatcaaacgtgcctaccgtaagctgatgagtgaacaccatcccgataagctggtggcgaaaggtttgccgcctgagatgatggagatggcgaagcagaaagcgcaggaaattcagcaggcatatgagctgataaagcagcagaaagggtttaaatgaccctgtaaatgatgctgagtaactgcccacgattaaaggtggccgccctggcggtcacttctttgagaaaaggcgtttactcagaatggtggacaggctcaatgcacgatttacgggaggggttctgtaggttttatcgcgttgaccctgcttaaggttgagagctttacgacgagcggaattatatttttacgtcttaaaaataaaaaacacatacctgaatgagcgatttttgaaagtatatttattcagaacgcgcatcatgagtttttaactcaatgcgaggctattaccatgaaagtaagtgttccaggcatgccggttacacttttaaatatgagcaagaacgatatttataagatggtgagcggggacaagatggacgtgaagatgaatatctttcaacgcttgtgggagacgttacgccatctgttctggagtgataaacagactgaggcttataaacttctgttcaatttcgtgaataaccagactggcaacatcaacgccagtgaatactttactggggctatcaacgagaatgagagagaaaagtttatcaatagcctggaattattcaataaacttaaaacatgcgcaaaaaatccggatgagttggtcgcaaagggcaatatgcgctgggtcgcccagaccttcggggatatcgagttaagtgtcactttttcattgaaaagaataagatatgtactcagacgttgcagctgcataagggccaaggtaacttgggcgttgatcttagaaaggcttaccttcccggcgttgacatgagggattgttaccttggtaaaaaaacaatgaaaggtagcaatgatatcctttatgagagacctgggtggaatgctaacctgggcgtgctaccccggacggtgctaccccggacggtgctaacccggacggtgctaacctggacggtgctaccgtgaacggtgctacctccttatatgatgaggtaattattattaataaaatcccccccaaaaaaattgatactaaaggagttgctactgaagaagttgctactaaaaaagtactgctgaacaaattactgacaacgcaattattgaatgagccagaataagctaaggttgaaggggctggaacgccccttcaaccttagcagtagcgtgggatgatttcacaattagaaagacctgcatgatgagctagagaagaggctagtgacgcaaggcgtcgtgcaggacacggatcaccgagatgggcatcgccaaccagactgctaattagcccatgaataacaatcagaaaggaccataacagacccgttaaaatgaaatataagagacggtcaacgggtgaagaaaaagttcaaaaattcgctgtggagcaggaagggaattaccgaatggaaagcgtagccacacgcaacaactgaaagcagtttggcagaaacaaaaaatccccggactcggggatttatgtacaagaggcagcccttaggatgagggtataaacgtacaggaaaggttaaaaatccgctggcgctttaaacgtcatactattgccatacgccggatgggtaatcgtcaacatctctgcatgtagcaacaaacgtggtgccatcgctctcgcttctggacttgcataaaaacgatcgccgagaatcggatgacccagcgccagcatatgcacacgcaattgatggctacgcccggtaatcggttttaacaccactcttgccgtgttatccgccgcatactccaccacttcatattccgtctgcgcaggtttacccgtttcgtaacagactttctgtttcgggcggtttggccagtcgcaaatcagcggcagatccaccagaccttctgcgggggatggatgcccccagacgcgggccacatactgctttttcggctcgcgctcgcggaactggcgttttaactcccgctccgcggctttggtcagcgccactacaatcacgccgctggtagccatatccagacgatgcacgctttctgcctgcggataatcacgctgaatgcgcgtcatcacgctgtctttgtgctcttccagacgacccggcacactcaacaaaccgctcggcttgttgaccaccataatatggtcatcctgatacaggataaccaaccagggttcctgcggtggattgtagttttccatccccattttcggctccgttactgatgcgttacaacgatcaaacgcagggcatccagacgccaacctgcctgatccaggctttccattacctgctgacggttgctctcaatggcggtcagttcgtcgtcacgaatgttcgggttcactgcacgcagagcttccagacgagacagctcggcagacagtttttcgtcggcttcgttacgcgctgcatcaatcaatgcacgggcagatttctcgatctgcgattcacccagttgaaggatagcgtgaacatcctgctgcacggcgttaaccagtttgctgccggtgtgacggttaaccgcgttaagctggcggttaaaggtttcaaactctacctgcgccgccaggttgttgccgtttttatccagcagcatacgtaccggcgtcggtggcaggaagcggttgagctgcaactgcttcggagcctgggcttcaaccacataaatcagttccaccaacagcgtacctaccggcaacgctttgttttttaacagactaatcgtgctgctaccggtatcgccagaaaggatcagatccagaccgttgcggatcagcggatgctcccaggtaataaactgtgcatcttcacgcgccagcgccacttcacgatcaaaggtgatggtgatgccatcttcgctcaggccagggaagtccggcaccagcatatgatcggacggcgtcagcacgatcatgttgtcgccgcgatcgtcctgattgataccgataatatcgaacaggttcatggcgaaggcgatcaggttggtatcgtcatcctgctcttcaatgctttctgccagtgcctgggctttttcgccaccgttggagtggatttccagcaggcggtcacgaccctgttccagctgtgctttcagcgtttcatgttgctcgcggcagtttttgatcagatcgtcaaagccttcggtttgatccggactagccagatagttaatcagatcgttgtatacgctatcgtaaatagtgcgtccggtcgggcaggtgtgctcaaatgcatccagaccttcgtgataccagcgcaccagcacgctctgagcggttttctccagataaggcacatggatctgaatatcgtgcgcctggccgatacgatccagacgaccaatacgctgctccagtagatccgggttgaatggcaggtcaaacatcaccatgtggctggcgaactggaagttacgtccttcagaaccgatttcactgcacagcagtacctgtgcgccggtgtcttcttcggcaaaccaggcggcagcgcggtcacgttcgataatgctcataccttcgtggaacaccgcagcgcgaataccttcacgttcgcgcagtacctgctccagttgcagcgcagtggcagctttggcgcagatcaccagcactttctgagagcgatggctggtcaggtagcccatcagccactcaacgcgcggatcgaagttccaccaggtggcgttatcaccttcaaattcctgataaatacgctccgggtagagcatatcgcgagcacgatcttccgcacttttacgtgcgcccataatgccggagactttaatagccgtctgatactgcgtcggtagcggcagcttaatggtgtgcagctcgcgtttcgggaatcctttcacaccgttacgcgtgttacggaacagcacgcggctggtgccgtggcgatccatcagcatgctaaccagctcctgacgggcgctctgggcatcttcgctgtcgctgtttgctgcctgcaacagcggctcgatatcctgctcgccgatcatctcgccgagcatgttcagttcgtcattgctcagtttgttacctgccagcagcatggcaacggcgtccgcaaccggacgataatttttctgctcttcaacgaactgcgcaaaatcgtggaaacggttcgggtccagcagacgcagacgggcgaagtggctttccatccccagctgttccggggtcgcggtcagcagcagaacgcccggcacgtgctctgccagttgttcaatggcctgatattcacggcttggcgcatcttcgctccacaccaggtgatgcgcttcatcgaccaccagcaggtcccattcggcttcacagagatgttccaggcgctgtttgctacgacgggcaaaatccaggctgcaaatcaccagctgttcggtgtcaaacgggttgtaagcatcgtgctgagcttcggcataacgctcatcatcaaatagcgcaaagcgcaggttgaaacggcgcagcatttctaccagccactgatgctgtaaggtttccgggacgataattagcacacgttcagcagcgccagagagcagttgctgatgcaggatcatcccggcttcaatggttttccctaaacccacttcgtcagccagcaggacgcgcggcgcgtggcggcgaccaacatcatgagcgatgttgagctgatgcgggatcaggctggtacgctgaccgcgcaggccgctgtacggcatacggaactgttcgctggaatatttacgcgcgcgataacgcagcgcaaagcggtccatacggtcaatctgcccggcaaacagacggtcctgcggtttgctgaacaccagtttgctatcaaggaaaacttcacgcagggctacgccggactcttcagtatccaggcgagtaccgatataggtcagcaagccattttcttcttttacttcttcgacttgcatctgccagccgtcatggctggtaatggtatcaccagggttgaacatcacgcgggtcacgggggaatcactgcgtgcgtacagacggttttcaccagtagatgggaaaagtaaagtgacagttcgcgcatccaccgcgacaacggttccaagtcccaattcgctttctgtatcgctgatccagcgttgaccaagtgtaaaaggcatatgtgttcggctctatatctttaattgcaggcaataaccacccgctaccgtgcttatgaggtagtggtgttattcaggtccaggaatggaaagggcgctatggtactggatggcaaagcattcgtcacgcatcaaaatggtatctggcgaactcttttttttgctcaaaatagcccaagttgcccggtcataagtgtagcaaaattatcctcaataaaagggagtattccctccgccacgggttgtagctggcgggtcagatagtgttcgtaatccagtggactacgttggtagtccagcggctccgggccgttggtggtccatacgtacttaatggtgccgcgattctgatattgcaaggggcgaccacgcttttggttttcttcatcggcaaggcgagcggcgcgtacatgaggcggcacattacgctgatactcgctcagcggacggcgaaggcgtttacggtaaaccagtcgcgcatccagttcacccgccatcagtttgtcgatggtttcgcgtacatattcctgatatggctcgttgcggaagatgcgcaggtatagctcctgctgaaactgctgggccagcggcgtccagtcggtgcgcacggtttccagccctttaaacaccatccgctgcttgtcgccctcctgaatcagtccggcataacgctttttactgccggtatcggctccgcgaatggttggcatcagaaaacggcagaaatgggtttcatactccagttctaatgcgctggtcagccgttgtttttgcagcgtttccgcccaccaggcgttaacgtgctgcaccagtgcacgaccgattttcgccgcttcttcttcgctatgtgcgcctttcagccagacaaacgtactgtcggtatcgccgtagataacgtcgtagccctgtgcttcaatcaacgctttggtttgccgcatgatctgatgaccacgcatggtgatgctgcttgccagccgcggatcgaagaagcggcaggcggtggtgccgagcacgccataaaaggcattcatgatgattttcagcgcctggctcagcggtttgttaccctggcgtttggcttcatcgcgcccgtgccagatgttagtcacaatctccggcaggcaatgtttttctcggctgaaccaggcatcgagaaaaccttcggtactgtgctctggatcaggctgcgccatgccttccaccagcccgacgggatcaatcagaaaggtgcggatgatgctcgggtacaggcttttatagtccagcaccagcacactatcataaagccctggccgactatccatcacgtagccgccagggctggcgtgcggcggcacttcgccgagattaggcgcgacataaccagcgcgatgcattcgcggaaaatagagatgaccaaatgccgccacgctaccgccgtgtcggtccaccggcaggccgttcaccgttgcccgttcgagtaaaaatggcatgatttcagttttgtggaagatctgcgtcaccagctcgcaatctttcaggttataagttgccagcgcaggtttatcttcggcgaaacggcggtcaatttcgtccattcgatcccacgggttatcgatagattttccttcgcctaatagctcctgagcgacagtttccaggctgaaactagagaaattccagaacgcggatttcagcgcctcgataccgtcgataattagccgacctttagcctgggcaaaaaagacgccgtttttaaagccgtgctcgcgccactccagctcgctattatcgcgcccaagacgcagcggaagacggtaacgctcggcatgtttttgcagcattcgcagatcgaactgcaccacgttccaaccgatgatcacatcaggatcgtagttggcaaaccaggcgttgagtttttccagcaactgcgggcggctggcgacgtattccagttcgaaatcaaggctggaggcgtcgccattctccggccccagcatataaacgatgcgctgcccgcagccttccaggccgatgcagtacagctcaccgtggcgggtggtttcaatatctatagaaacccacttgagcggcggacgatagtcgggatgcggtttcagacgggcattaacgatagtgccattgtgcatatcaccctcgacccacaccggactggtgataaaccgctccatcagatagcgttctggcggacgcacatcggcctcgtagacggtaacgccaccttcacgcaggcgcttttcgtaattcatcaattggcgatgggcgcgacagtaaaggccatacaccggctggcggtgaaaatcctttaacgccagcggtgtcaggcgaaagccttgttcaccctgcaaaatatgctgagcgcggggaacctgatcggcgggaataaacgccacggactcttgcggtgcaagcgtaacctgcaacggcccgttgtccgtcgccagccagaaggagacttctgtcccttgcggggtgtcccgccagtgtcgggttaagataaaacctgcctgcgccacgctgaaaatccatcaaaaaaccaggcttgagtatagcctggtttcgtttgattggctgtggttttatacagtcattactgcccgtaatatgccttcgcgccatgcttacgcagatagtgtttatccagcagcgtttgctgcatatccggtaactgcggcgctaactgacggcagaatatccccatataagcgacctcttccagcacgatggcgttatgcaccgcatcttcggcatttttgccccatgcaaacgggccgtgggaatggaccagaacgccgggcatttgcgctgcatcgataccctgtttttcaaaggtttctacgatgacgttaccggtttcccactcatattcgccgttgatttctgcgtcggtcattttgcgggtgcagggaatggtgccgtagaaatagtcggcgtgggtggtgccggttgctggaatgctctgacccgcctgcgcccagatggtggcgtggcggctgtgcgtatgcacaatgccgccaatggaggggaatgcctgatagagcagccggtgagttggcgtgtcggaggagggctttttcgtaccttcaaccacttcaccggtttcgatgctaaccacgaccatatcgtcagcggtcatgacgctgtaatcgacgccggaaggtttgatcacaaagacgccgcgctcgcgatcaacggcgctgacgttgccccatgtgagcgtgaccaggttgtgttttggcagcgccaggttggcttctaatacctggcgtttgagatcttctaacatgttgactccttcgtgccggatgcgctttgcttatccggcctacaaaatcgcagcgtgtaggcctgataagacgcgccagcgtcgcatcaggcgttgaatgccggatgcgctttgcttatccggcctacaaaatcgcagcgcgtaggcctgataagacgcgccagcgtcgcatcaggcgttgaatgccggatgcgctttgcttatccggcctacaaaatcgcagcgtgtaggccagataagacgcgtcagcgtcgcatcaggcgttacataccggatgcggctacttagcgacgaaacccgtaatacacttcgttccagcgcagcgcgtctttaaacgctggcaggcgtgtgtcgttatcaatcaccgtgatttcaatgtcgtgcatctcggcgaattggcgcatatcgttgaggttcagtgcatggctgaagacggtatggtgcgcgccaccagcgaggatccacgcttcggaagcagttggcagatccggttgcgctttccacagcgcattcgccaccggcagtttcggcagggagtgcggtgttttcaccgtgtcgatgcagttaaccagtagacggtaacgatcgccgagatcaatcaagctggcgacaatcgctgggccggtttgggtattgaagatcaggcgggcaggatcgtccttaccaccaataccgagatgctgaacgtcgaggatcggtttctcttctgcggcgatgctcgggcagacttccagcatatgggagccgagcaccaggtcattacctttctcgaagtgataggtgtagtcctccataaaggaggtgccgccctgcagaccggtactcatcaccttcatgatgcgaagcagggcggcagttttccagtcgccttcgcccgcaaagccgtaaccctgctgcatcagacgctgtacggccagaccaggaagctgtttcagaccgtgcaaatcttcaaaggtggtggtgaacgcgtggaagccaccttgttccaggaaacgcttcatccccagctcaatacgcgccgcttccagcacgttctgtcgttttttgccgtggatttgtgtggcaggcgtcatggtgtagcagctttcgtactcatcgaccagcgcgttaacatcgccgtcgctgatggagttcaccacctgcaccagatcgccaaccgcccaggtattgacggagaaaccgaacttgatctgtgcggcaactttatcgccatcggtgaccgccacttcacgcatgttatcgccaaatcggcagactttcagatgacgggtatcctgtttagagaccgcctgacgcatccaggagccgatacgctcatgggcttgtttatcctgccagtgaccggtaaccacggcatgttgctgacgcatacgcgcgccaatgaagccgaactcgcgaccgccatgtgcagtctggttcaggttcataaagtccatatcgatactgtcccacggcagcgccgcgttgaactgggtgtggaattgcagcaacggtttgttgagcatggtcaggccgttgatccacattttggccggggagaaggtgtgcagccacaccaccagaccagcgcaacgatcgtcgtaattcgcgtcgcggcaaatagcggtgatttcatccggcgtggtgcccagcggtttcaacaccagtttgcagggcagtttcgcttccgtattcagcgcattaacgacgtgctcggcatgttgggtgacctgacgcagggtttccgggccatacagatgctggctgccaatgacaaaccacacttcataattatcaaaaatcgtcattatcgtgtccttatagagtcgcaacggcctgggcagcctgtgccggggcggaagttggaagatagtgttgttcggcgctcatcgcccattgctgatagcggcgataaagctgttcaaagcgttgtgcctgctcgctgcacggttgcagggttttctctaccgcactggccattttttgctgagcacttgggatgtctgcgtgcactttcgcggcgacggcagcaaaaatcgccgcaccgagcgcacagcactggtcagaggcaacaatttgcagcgggcgattcagcacgtcgcagcaggcctgcataatgacctggtttttccgcgcgatgccgcccagtgccatcacgttattaacggcgatcccctgatcggtaaagcactccatgattgcgcgtgcgccaaaggcggtggcagcaatcaaaccgccgaacagcagcggagcgtcggtagcgaggttaagatcggtaatcacccctttcaggcgttggttagcgttcggtgtgcggcggccgttaaaccagtcgagcaccaccggcaggtgatccagagacggatttttggcccatgcttcggtcagcgccggaagcagttgtttctggctggcgttgatttgcgttttcagttccggatgctgggcggcaagctgttccagcggccagccgagtacgcgaccaaaccaggcgtagatatcaccaaacgcgctttggcctgcttccagaccgataaatccaggcaccacgctgccatcaacctgaccgcaaatacctttaactgcccgctcgccaacgctctgtttgtcggcaatcagaatgtcgcaggtggaagtaccgataacttttaccagtgcgttaggctgtgcgcctgcgccaactgcgcccatatggcagtcaaacgcgccgccggaaatcaccacgctttcaggcaggccgagacgctgcgcccattccgggcataaggtgcccaccggaatatcggcagtccaagtgtcagtgaacagcggggaaggcaaatggcgattgaggatcgggtccagctcatcaaagaaactggctggcggcaggccgccccagctttcgtgccacagagatttatgcccggcgctgcaacgtccgcgacgaatatcctgcgggcgggtggtaccggaaagcagagctggcacccagtcgcacagctcaatccagcttgcggcagattgcgccacggcgctgtcctggcgagtcacatgcaggatttttgcccagaaccattcgctggaataaataccaccaatgtagcgggagtagtcaacgttgcccggcgcgtggcacaaacgggtaatctcttccgcttcttcaaccgcagtgtggtctttccacaatacgaacatcgcgttcgggttttcggcaaactccgggcgcagcgccagcacgtttccgtcggcatcaatcggtgcgggcgtgctgccggtactgtcaacgccaatcccgaccacagctgcgcgctgttcgacgctaagctctgcaagcacggttttcagtgccgcttccatactctcaatgtagtcacgcggatgatgacggaactggttattcggggcatcacaaaattgccctttctgccaacggggataccactctacgctggtggcgatctcttcaccggtagcgcagtccaccgccaaagctcgcacagaatcactgccaaaatcgaggccaattgcaatcgccatcgtttcactccatccaaaaaaacgggtatggagaaacagtagagagttgcgataaaaagcgtcaggtaggatccgctaatcttatggataaaaatgctatggcatagcaaagtgtgacgccgtgcaaataatcaatgtggacttttctgccgtgattatagacacttttgttacgcgtttttgtcatggctttggtcccgctttgttacagaatgcttttaataagcggggttaccggttgggttagcgagaagagccagtaaaagacgcagtgacggcaatgtctgatgcaatatggacaattggtttcttctctgaatggtgggagtatgaaaagtatggctgaagcgcaaaatgatcccctgctgccgggatacagctttaacgcccatctggtggcgggtttaacgccgattgaggccaacggttatctcgatttttttatcgaccgaccgctgggaatgaaaggttatattctcaatctcaccattcgcggtcagggggtggtgaaaaatcagggacgagaatttgtctgccgaccgggtgatattttgctgttcccgccaggagagattcatcactacggtcgtcatccggaggctcgcgaatggtatcaccagtgggtttactttcgtccgcgcgcctactggcatgaatggcttaactggccgagtatatttgccaatacgggtttctttcgcccggatgaagcgcaccagccgcatttcagcgacctgtttgggcaaatcattaacgccgggcaaggggaagggcgctatagcgagctgctggcgataaatctgcttgagcaattgttactgcggcgcatggaagcgattaacgagagcctccatccaccgatggataatcgggtacgcgaggcttgtcagtacatcagcgatcacctggcagacagcaattttgatatcgccagcgtcgcacagcatgtttgcttgagcccgagccgtctgagtcatcttttccgccagcagttagggattagcgtcttaagctggcgcgaggaccaacgcattagtcaggcgaagctgcttttgagcactacccggatgcctatcgccaccgtcggtcgcaatgttggttttgacgatcaactctatttcagccgagtatttaaaaaatgcaccggggccagcccgagcgagtttcgtgccggttgtgaagaaaaagtgaatgatgtagccgtcaagttgagttaattggtaacgaatcagacaattgacggcttgacggagtagcatagggtttgcagaatccctgcttcgtccatttgacaggcacattatgcaagcattgctggaacactttattacccaatccaccgtgtatagtttgatggcggtggtgttggtggcctttctggagagcctggcgctggtcggtttgattctacccggtacggtgctgatggcggggctgggagcgctgattggcagcggcgagttaagtttctggcacgcctggctggcagggattattggctgcttgatgggcgactggatttctttctggctgggttggcgttttaaaaagccgttgcatcgctggagttttctgaagaaaaacaaagcactacttgataaaactgaacatgcgttgcatcaacacagcatgttcaccattctggtcggtcgttttgttggcccgacgcgtccgctggtgccaatggtggcgggaatgctggatctgccggtggctaaatttattacgccgaatattatcggctgcctgctgtggccgccgttttacttcctgccagggattctggcgggcgcggcgatcgatattcctgccggaatgcagagcggtgagtttaaatggttgctgctggcaacagcggtgtttttgtgggttggtggctggctgtgctggcggttatggcgcagcggtaaagcgactgaccgtttgagtcattatttgtcccgcggtcgtttgttgtggctgacgccgttgatttctgccatcggcgtggtggcgctggtggtgttaattcgccacccgttgatgccggtgtatatcgatattttgcgtaaagtggttggggtttaagagatagtcttgtgcgggttgcctgatgcgacgcttgccgcgtcttatcaggcctacaaaacgcactacccgtaggtcggataaggcgttcacgccgcatccgacagtgcatattaacccgtaatccccaatagtgcgctagcactcgccttaccgctcaacaactcattggtcataccctgccaggcgatgcgcccgtcggcgactactacgctgcgcgtggcgatccgcgccgcatcttccacgctgtggctcaccatcaatagcgtcattttttgctgctggcagctcgtgctcaccagcgtcaacatctcctgacgtaacgccggatcgagcgcagagaacggttcatcgagcaataaaatcggctgttcgcgtaccagacaacgcgctaacgccactcgctgtcgctgaccgccggaaagctcgcccggtaaccgcgccattaaattatcaatccccatctggcgggcgatagcgtgcattttcccctgctgtaccgcgttcagtttcaatcccggatttagccccagcccgatgttctgtgcgaccgtcaggtggctgaacaggttgttctcctgaaacagcatgctcaccggacggcgactcggcggcatagttgtgtgatctacgccatcgatagtcaggctaccgctggctggcgtcagaaaaccggcgatcaaattcagcagggtacttttacccgcgccgcttggcccgaggatcgccacctgctcgccgcgttccaccgttaagctaaaacgcatcggcaaatggtggtaaagccaggtgatatcagtcagttttaacatttcgccccggtagtttttcaatcacggtaaacagcagaaaacagagcagcagcagaattaacgcggtgaccgcaccgtcctggctgcgataggagccaatttgctggtagagataaaacggcagggtgcggaaatcatcgttaccgaacaacgccaccacgccaaaatcaccaatgctcagcacgcatgcaaaggccagcgcctgcgccagtggacgtttcagggcgcgcagctccaccacttttaagcgactccagccttcaatccccaggctctgacataacatgctgtagcgggcggtgatatcgcgcatcgggttttccagcactttcagcgcataagggatcgccattaacgcattggtgaaaatcacaatgccgtcagcagattgtggcaggccgatagtgttgttgagcagtaaaaagaagccggtagccagcacaatccccggcatggcgaggatcaacatgccgctcatctccagcacctgacccgccagcattttctgccgcgcccgcagttcgcgactgctccatagcagcatcatggtcagcactacgcacaatacacctgccgccagcgcaatacgcaagctggtccacagcgcctgccacagcaccggttgtgccagcacttccggcaactggcgatttaccccatcgacgatcaccgccagtaacggtggcagcaacagcagcagcgccagcacaattaacaccgtgtcgcaaatgcggctatgcagacgatcgtccgggtcgcgccagccttgcagcagcgtggtgccgggcgcaatggccttactcaatcgctgactcaacagcaccagcccgaggcagcacaccatctggagcagcgccagcattgccgcgcgggcaggatcgtagtcgtaactcagcgcctgatagattgccagctcgatagtggtcgcctgcggaccgccccccaggcttagcacggtggcgaagctggcgaaacagagcataaagataagcgcagcaaccggcgggatttgtcgccgtaaccacggccattcgacgaagcggaaaaaatgccagctacgcatcccaagctgggcggcaagttgacgctgttcgccggggatgttttccagtgcctggagtaataagcggctcgccatcggcagattaaaaaacacatgggccagcaaaataccttgcaggccgtaggggctaaaggtccactccagaccgaggctttggcagagtgttgccagccagccctggcgaccatagacgctaagaatgccgaaaacagcgaccaacaccgggaggatcaaggtcattgcacacagacgcaacagcgccagccgacccggaaagcgcctgcgatagagcgcgcgggcgaggaatatcgcgggtatgacagagagcagtgcgctgagaaacgcctgccagaaggagaagcgcaccacatgccacagatagctgtcctgccagactgccacccagtcatcctgcggcgcgttccaccacagggcgagaaacgccgccagcgcaaccgctaccaccagcgtggtggcgcttacacctggaattaaccagccgggaattaacggctgacggcgcgttgccattcgctaatccatgcctgacgttgtgccgccacttcggctggcgtgaactccaacgtggttgcgggtttggtcaatttttcaaaaccggcaggcagcgtgacgtttgccaccggatacatccagttgccggttgggatcgcattctggaaagccggagaaaccataaactggaggaatttttgcgccagctccggctgcttgctggcagcggtgcgggcggcgacttccacttgcagatagtgaccttcgctgaagttcgcggcggcgtagttatctttcttctcttcgagaatgtgataagccggagaggtggtgtaactcagtaccagatcgctttcaccttttaaaaacaggccgtaggcttcgctccagcctttggtgaccgtgaccgttttcttcgccagtttctgccaggcttgtggggcgtcatcgccatagactttttgcatccatagcaacagacccagccccggtgtactggtgcgcggatcctgataaatcacccgccagttttgatcgctctcaaccagttctttcaggctttgtggcgggtttttcagtttgttcttgtcataaacgaaggcgaagtagccataatcaaacggtacgaaagtgtcattattccagccgccgggaacgttaacggcatccgctgccacaccgcttttggcaaacagtccggttttactggcggcgtctaacaggttgttatccagccccagcaccacatcggctttactgtttttgccttccatccgtagacggttgagaaggctaacgccatcttccagcgccaccagtttcagttcgcaattacagtcggcttcaaaggcttttttaaccaccggaccaggcccccagtcggcggcgaaggaatcgtaggtataaacagtcagaacgggtttagcgaaaacgggcgctgtgcacagcaacagcaggggcagacatttttttaacactttgcacctcaaaaaagagtggcaaaggacttgagaaggagcctcaaatcccttcgccggcgttatccggatcaggttcgacgggtattttctcagcgcacgcgtacgcgtggcaccccgttgagaacggcgttagtgtagtgattttgttatcaaccagcaatcatggatccggtggcgcaaaccacgcacttttaaaatcgaaccagccgagggtattcatgcgcaggccgcgcatactgcgttgcccctgaatgatcagccagtggtgcaataatggcaccatcgctttgctggcgaccagttgctggcaccagttcgccagattcatctcgccattgcgccagcgagcagcgtcggcttgccagtcaatgggaatgcaatgttgtagcagtggcacttcgcataaatgtgcgaaaacagagaagtccagcggcagggtaaagttggcgctgtttagccagatatcactttcgatctctcctgtatgccactgatcgtagtcgatctctttgattttcagcgtgacctggtgacttgccagaatctgctgcatgatcccggcaatcacccgatgctcactgtgatcctgataaaaggttagggtgaggctttccaggccagccggtttttcgctctttatggtgcgggcatggtgccaacgggggagcagtccataagccgggaaccacagttgctggtactgttcctcagcgaaatagaccagattagttggagaaagcacatagcttacccagtccctgacttgctgattcgccccgcgatgggtgcggctgtcgaacagtaaatagtagcaaccttcctccaggcggctttcaatctctttttcctcgccctgtggaccttttagcatcagccctccggctggctcgtcggcaatttccggcagaacccagacgttaacttcgtcgattaatgcccggtaaccgaagaagtcatcgaatgcctgaattttcagttgattggtgctgttgcgaatcaccgcatacggaccggtgccgatgggatggctggcaaagttactgagggtttcccattcgcgcggcaggatcatcgccggaacttgccccagcagtaacggtaaccagcggtccggttgcgtgagatggatatccagcgtccagggcgtcgggctcacaatgtcagcaatatggctatagagcggcagcgtattgattcgttttaaagaggcgatcacatcgtccatttccagttcacgaccatggtgaaaatggactcctggacgcaaaaagaaacgccagtgaagcggactaatttgctgccagtggtgggcgatgtctgcttccagttccccattttcctcatttatgcgcgttaggctactgaagatttgccgggcgatatgggtttcggaacggcgcaatgcgctgccaggtagcagattacgcaacggacgatagtagagcacgcgcaggatgtgccgcccctggcggaagctgcggcccagatgagaaaccagcatttgccgcacagtcgctttgtcgccaaccaactgcaccagttgatcgatacgatcctgctccagcaggtcttccgcccgctgttgctgaagcgccagcccggtatagaggaatgtcagacggctgcgtttaccgcgcccgacttccgcttcccacgtcagccagccgcgatcctgcatggtgttgagcagggtgcgcatatgacgacggctgcagctcaataacgctgccagttcgttgagcgttgtgtcctggcttttaccctcgcagcattgccacaggcggatgaactgttgttgcagacgagcagatggcataaaaggggaactcctgtgcaaaagacagcaattttattttccctatattaagtcaataattcctaacgatgaagcaagggggtgccccatgcgtcagttttatcagcactattttaccgcgacagcgaagttgtgctggttgcgttggttaagcgtcccacaacgattaaccatgcttgaaggactgatgcagtgggatgaccgcaattctgaaagttgacttgcctgcatcatgtgtgactgagtattggtgtaaaatcacccgccagcagattatacctgctggttttttttattctcgccgcgctaaaaagggaacgtatgatctggataatgacgatggctcgccgtatgaacggtgtttacgcggcatttatgctggtcgcttttatgatgggggtggccggggcgctacaggctcctacattgagcttatttctgagtcgtgaggttggcgcgcaacctttctggatcggcctcttttatacggtgaatgctattgctgggatcggcgtaagcctctggttggcaaaacgttctgacagtcagggcgatcggcgaaaactgattatattttgctgtttgatggctatcggcaatgcgctattgtttgcatttaatcgtcattatctgacgcttatcacctgtggtgtgcttctggcatctctggccaatacggcaatgccacagttatttgctctggcgcgggaatatgcggataacagcgcgcgagaagtggtgatgtttagcagcgtgatgcgtgcgcagctttctctggcatgggttatcggtccaccgttggcctttatgctggcgttgaattacggctttacggtgatgtttagcattgccgccgggatattcacactcagtctggtattgattgcatttatgcttccgtctgtggcgcgggtagaactgccgagcgaaaatgctttaagtatgcaaggtggctggcaggatagtaacgtacggatgttatttgtcgccagcacgttaatgcggacctgcaacaccatgtacattattgatatgccgttgtggatcagtagcgagttaggattgccagacaaactggcgggtttcctgatggggacggcagctggactggaaataccagcaatgattctggctggctactatgtcaaacgttatggtaagcggcgaatgatggtcatagcagtggcggcaggagtactgttttacaccggattgattttctttaatagccgtatggcgttgatgacgctgcaactttttaacgctgtatttatcggcattgttgcgggtattgggatgctatggtttcaggatttaatgcctggaagagcgggggcagctaccaccttatttactaacagtatttctaccggggtaattctggctggcgttattcagggagcaattgcacaaagttgggggcactttgctgtctactgggtaattgcggttatttctgttgtcgcattatttttaaccgcaaaggttaaagacgtttgatgacgtggacgatagcggaaagcccggtcatttgaccgggcaaggggattaattcataaacgcaggttgttttgcttcataagcggcaatggcgtcgtcgtgctgcaaggtaagcccaatactgtccagaccgttcatcatgcagtggcggcggaaggcatcgatggtaaagcgataggttttctctcccgctttcacctcttgcgcttccagatccacgtcgaaatggatccccggattagctttcaccagcgcaaacagttcgtccacttctgcatcgcttaatttcaccggcagcagctggttgttaaagctattgccgtagaagatgtcagcaaaactcggcgcaatcaccactttaaaaccgtagtcggtcaatgcccagggcgcgtgctcacggctagagccacagccgaagttttctcgtgccagcaaaatggaagcgccctgatactgcgggaagttcagcacgaagtccgggtttggctgttggcctttttcatccagaaaacgccagtcgttaaacagatgcgcgccaaaacccgtacgggtcactttctgcaaaaactgtttcgggatgattgcatcggtatcgacattggcggcatccagcggaaccaccaggcctgtgtgtttgataaatttctctgccatggtgtgctccttatttaatgttgcgaatgtcggcgaaatgtccggtcacagcagcagcggcagccattgccgggctgaccagatgcgtgcgcccgccgcgcccctggcggccttcaaagttacggttgctggtggaggcacaacgttcgcccggattcagacggtcgttgttcatcgccagacacatactgcagccaggcaagcgccattcaaaaccggcttcaataaagattttatccagaccttccgcttccgcctgggcttttaccgggccagagccgggaaccaccagtgcctgcacgcctggcgcgacttttcgccctttggcgatctccgctgccgcgcgtaaatcttcaatgcggctgttggtacaggaaccgataaacactttgtcgatagccacttcggtcagcggaatacccggtttcagccccatataggccagcgctttttctgcgctcgcgcgttcaaccggatcggcaaagctagccggatcgggaatattgtcgttcacggaaatcacctggccgggattggtgccccaggtgacctgcggactaatttcttctgcttgcagagtgacaacggtatcgaaagttgcgccttcgtcggtttgcagggttttccagtaggcaacggcgtcgtcgaaatctttgcctttcggcgcatgcagacggcctttgacatagttaaaggtggtttcgtccggtgcaaccagaccggcttttgcgcccatttcgattgccatattgcacagggtcatacgaccttccatgcttaaatcacggattgcttcgccgcaaaactccaccacatgcccggtgccgcctgcgctaccggttttaccgataattgccagcacgatatcttttgcggtaatgcccggcgcggctttgccctggacttcaattttcatggtttttgcgcggccctgtttcagggtttgcgttgccagtacgtgttcaacttcggaagtgccgataccaaaggccagtgcgccaaacgcgccgtgggtggcggtatggctgtcgccgcagacaatggtcatccccggcaaggtgacgccctgttccggccccattacgtggacgatcccctgatacgggtgattcaggtcatacagttcgacgccaaattctttgcagtttttgatcagttcctgcatctggatacgcgccatttcaccgcaggcattaatgtctttggtctgggtagagacgttgtgatccatggtagcgaaggttttgcccggctgacgtaccgggcgaccgtgggcgcgcagaccatcgaacgcctgcggactggtcacttcatgcaccaggtggcggtcgatatataacagtggggtttcgttttcggcttcgtacacaacgtgagcgtcgaacaatttttcgtataacgtcttagccatgattacaccccttctgctacatagcgggcaatgatatcgcccatttcatcggtactaacggcggcagcgccacgggctaaatccccggtgcgaatgccttcttctaatgcgcggttaatggcgcgttcaatggcgcaagccgcatcatcggcatccaggctgtaacgcagcagcagtgccaggctaaggatttgtgcaatcgggttggcgatgtttttgcctgcgatatctggtgcgctgccgcccgccggttcatacagtccaaaaccttgctcgttcaggctggcggaaggcaacatccccatgctgccagtgatcattgcgcactcgtcagacagaatgtcgccaaacaggttggagcacagcagaacgtcaaactgacttggatctttaatcagctgcatggtggcgttgtcgatgtacatatgcgccagttcgacatccgggtattccgtggcgatctcgttaacgatctcccgccataaaatagaggattgcagcacgttggctttatcgatgctcgtcactttgtggcgacgcttgcgagcagattcaaacgcgatgcgggcgatacgttcgatctcaaaacggtgatacacctcggtatcaaaggctttttcatattgtccgctaccttcgcggccttttggctgaccgaaatagatgccgccggtcagttcgcgcacacacaggatgtcgaagccgtttgcggcaatgtctgcacgcagcggacagaatgcttccagcccctgatacagttttgccgggcgcaggttgctgaataatttgaagtgcttacgcagaggcagcagcgcgccgcgttctggttgctggtctggtggtaaatgttcccacttcgggccgcctacgctgccaaacagcacggcatcggcttgctcacaaccttcaaccgtcgcaggcggcagtggttgcccgtggttatcaatggctgcgccgcctacatcgtaatggctggtggtgatgcgcatcgcaaagcggttgcgcacggcatccagcactttcagcgcctgggtcatcacttccggaccaataccgtcccccggcaatacggcaatatggtaattcttgctcatcacacggtttccttgttgttttcgttgtgttgagctttgcgttgcaactctttttcgacttctgcggcacgccagatattgttcagaacgtgcaccatggctttggcagaactctcgacaatatcggtagccaggccgacgccgtggaagcggcgaccgttgtagttagcgacgatatccacctgacccagcgcatctttaccgtggcctttggcggtcaggctgtatttcaccagttcgacgttatattcagtgatgcggttaattgcctgatagacggcatcgaccggaccgttaccgttggcggcttctgctttgacttcttcgccacaggccagtttgacggcggcggtggcgatatcgttagagccagactgcacgctgaagtaatccagacggaaatgctccggctcttcttgctgcttaccgatgaaggccagcgcctccagatcgtaatcaaacacctgaccttttttgtccgccagcttcaggaaagcatcgtacaaattgtctaaattatattcactttctttataccccatctcatccatgcgatgtttcaccgccgcacgcccgctacgagaggtcagattcagctggatttggttcagaccaatagattctggtgtcatgatttcgtagttttcgcggtttttcagcacgccatcctggtgtataccggaggagtgtgcgaatgcgccgctgccaacaatggctttgtttgccgggatcggcatattacaaatctggctaactaactggctggtgcgccatatctcctggtgattaatggcggtgtggacgttgagaatatccttacgaactttgatcgccatgatgacttcttccagggaacagtttccggcacgctcgccgatcccgttcattgcgccttccacctggcgtgcaccggcatgtaccgccgccagactgtttccgaccgccaggcccaaatcgtcgtgggtatgtacggagataatggctttgtcgatgttaggcacgcgttcatacaggccgctgatgattccggcgaactcaaacggcatggtgtagcccacggtgtccggaatgttgatggtggtggcaccggcattaatcgccgcttcgaccactcgcgccagatcggcaatgggtgtacgcccggcatcttcgcaagaaaattcaacatcatcggtgtaattacgggcgcgtttcaccatatagatagcgcgttcgatcacctcgtccagcgtgctgcgcagcttggtggcgatgtgcattgggctagtggcaataaaggtatgaatacggaaggcttcggcgactttcagggattcggccgccacgtcgatatctttttccacgcagcgagctaacgcacatacgcggctgtttttaacctggcgggcgatggtttgcacgctttcaaaatcgcccgggctagagacggggaaaccgacttccatcacgtcaacacccatacgctcaagggccagcgcaatttgcagtttttctttcacactcaagcttgcctgtaacgcctgttcaccgtcgcgcaatgtggtatcgaaaataatgacttgctggctcatggtttgggtccttgtctcttttagagcgcctcgcttcgggcataaaaaaacccgcgcaatggcgcgggttttttgtttgactgcgtgctggcttaatgctggatgccgctcactcgtctaccgcgcaaagaagatgcgtttagtagtagtagaccgataaagcgaacgatgtgagtcattaaatcagctccagatgaatgcgatatgcttttagagttactggatacaaaaacggatgtcaaccctgacgcaataaaaacgtcccgccagcgtgagttctgcatccgtaaaattagctaattgtgctgcggtggttaaagtaagcgatattaatttctgcttaactaccgacgcttttcatcggttgacatatttcagcataaatttttgcatctaatcaacgaggaaaaaggggacaaaatgcacgcgttgcaaaacctatcctgatgatttgtattgaattatatgttttgcgattttttttgatattgatttggtgaatattattgatcaattaatgttaagaattaatgcattaaatatataaattaattattaaataagcacatttaatccattttgtagatgattgagtattcgcggtagttatgattagattgttttcgcaacaaaaacattatggattattatgctgtggtaaatgactcattccacggcaatggattctgtttttatcagaacccgtatctttatgttttccgaattttactcattttgctttttcttattttatatgcatgataaatcatattcttcaggattatttctctgcattccaataagggaaagggagttaagtgtgacagtggagttaagtatgccagaggtacaaacagatcatccagagacggcggagttaagcaaaccacagctacgcatggtcgatctcaacttattaaccgttttcgatgccgtgatgcaggagcaaaacattactcgtgccgctcatgttctgggaatgagccaacctgcggtcagtaacgctgttgcacgcctgaaggtgatgtttaatgacgagctttttgttcgttatggccgtggtattcaaccgactgctcgcgcatttcaactttttggtagtgttcgtcaggcattgcaactagtacaaaatgaattgcctggtagtggttttgaacccgcgagcagtgaacgtgtatttcatctttgtgtttgcagcccgttagacagcattctgaccagccagatttataatcacattgagcagattgcgccaaatatacatgttatgttcaagtctagtttaaatcagaacactgaacatcagctgcgttatcaggaaacggagtttgtgattagttatgaagacttccatcgtcctgaatttaccagcgtaccattatttaaagatgaaatggtgctggtagccagcaaaaatcatccaacaattaagggcccgttactgaaacatgatgtttataacgaacaacatgcggcggttagcctcgatcgtttcgcgagttttagtcaaccttggtatgacacggtagataagcaagccagtatcgcgtatcagggcatggcaatgatgagcgtacttagcgtggtgagccaaacgcatttggtcgctattgcgccgcgttggctggctgaagagttcgctgaatccttagaattacaggtattaccgctgccgttaaaacaaaacagcagaacctgttatctctcctggcatgaagctgccgggcgcgataaaggccatcagtggatggaagagcaattagtcagtatttgcaaacgctaactgattgcagaataggtcagacatgaatgtctggtttattctgcattttttattgaatgtagaattttattctgaatgtgtgggctctctattttaggattaattaaaaaaatagagaaattgctgtaagttgtgggattcagccgatttattatcaatttaatcctctgtaatggaggattttatcgtttcttttcacctttcctcctgtttattcttattaccccgtgtttatgtctctggctgccaattgcttaagcaagatcggacggttaatgtgttttacacattttttccgtcaaacagtgaggcaggccatggagatgttgtctggagccgagatggtcgtccgaagccttatcgatcagggcgttaaacaagtattcggttatcccggaggcgcagtccttgatatttatgatgcattgcataccgtgggtggtattgatcatgtattagttcgtcatgagcaggcggcggtgcatatggccgatggcctggcgcgcgcgaccggggaagtcggcgtcgtgctggtaacgagcggtccaggggcgaccaatgcgattactggcatcgccaccgcttatatggattccattccattagttgtcctttccgggcaggtagcgaccagcttgataggttacgatgcctttcaggagtgcgacatggtggggattagccgaccggtggttaaacacagttttctggttaagcaaacggaagacattccgcaggtgctgaaaaaggctttctggctggcggcaagtggtcgcccaggaccagtagtcgttgatttaccgaaagatattcttaatccggcgaacaaattaccctatgtctggccggagagcgtcagtatgcgttcttacaatcccactactaccggacataaagggcaaattaagcgtgctctgcaaacgctggtagcggcaaaaaaaccggttgtctacgtaggcggtggggcaatcacggcgggctgccatcagcagttgaaagaaacggtggaggcgttgaatctgcccgttgtttgcagtttgatggggctgggggcgtttccggcaacgcatcgtcaggcactgggcatgctgggaatgcacggtacctacgaagccaatatgacgatgcataacgcggatgtgattttcgccgtcggggtacgatttgatgaccgaacgacgaacaatctggcaaagtactgcccaaatgccactgttctgcatatcgatattgatcctacttccatttctaaaaccgtgactgcggatatcccgattgtgggggatgctcgccaggtcctcgaacaaatgcttgaactcttgagccaagaatccgcccatcaaccactggatgagatccgcgactggtggcagcaaattgaacagtggcgcgctcgtcagtgcctgaaatatgacactcacagtgaaaagattaaaccgcaggcggtgatcgagactctttggcggttgacgaagggagacgcttacgtgacgtccgatgtcgggcagcaccagatgtttgctgcactttattatccattcgacaaaccgcgtcgctggatcaattccggtggcctcggcacgatgggttttggtttacctgcggcactgggcgtcaaaatggcgttgccagaagaaaccgtggtttgcgtcactggcgacggcagtattcagatgaacatccaggaactgtctaccgcgttgcaatacgagttgcccgtactggtggtgaatctcaataaccgctatctggggatggtgaagcagtggcaggacatgatctattccggccgtcatagtcaatcttatatgcaaagcctacccgatttcgtccgtctggcggaagcctatgggcatgtcgggatccagatttctcatccgcatgagctggaaagcaaacttagcgaggcgctggaacaggtgcgcaataatcgcctggtgtttgttgatgttaccgtcgatggcagcgagcacgtctacccgatgcagattcgcgggggcggaatggatgaaatgtggttaagcaaaacggagagaacctgattatgcgccggatattaagtgtcttactcgaaaatgaaagtggcgcgttatcccgcgtgattggccttttttcccagcgtggctacaacattgaaagcctgaccgttgcgccaaccgacgatccgacattaagccgtatgaccatccagaccgtgggcgatgaaaaagtacttgagcagatcgaaaagcaattacacaaactggtcgatgtcttgcgcgtgagtgagttggggcagggcgcgcatgttgagcgggaaatcatgctggtgaaaattcaggccagcggttacgggcgtgacgaagtgaaacgtaatacggaaatattccgtgggcaaattatcgatgtcacacccagcctttataccgttcaattagcaggcaccagcggtaagcttgatgcatttttagcaagcattcgcgatgtggcgaaaattgtggaggttgctcgctctggtgtggtcggacttagccgcggcgataaaataatgcgttgagaatgatctcaatgcgcaatttacagcccaacatgtcacgttgggctttttttgcgaaatcagtgggaacctggaataaaagcagttgccgcagttaattttctgcgcttagatgttaatgaatttaacccataccagtacaatggctatggtttttacattttacgcaaggggcaattgtgaaactggatgaaatcgctcggctggcgggagtgagccggaccactgcaagctatgttattaacggcaaagcgaagcaataccgtgtgagcgacaaaaccgttgaaaaagtcatggctgtggtgcgtgagcacaattaccacccgaacgccgtggcagctgggcttcgtgctggacgcacacgttctattggtcttgtgatccccgatctggagaacaccagctatacccgcatcgctaactatcttgaacgccaggcgcggcaacggggttatcaactgctgattgcctgcagtgaagatcagccagacaacgaaatgcggtgcattgagcaccttttacagcgtcaggttgatgccattattgttagcacgagcttgcctcctgagcatcctttttatcaacgctgggctaacgacccgttcccgattgtcgcgctggaccgcgccctcgatcgtgaacacttcaccagcgtggttggtgccgatcaggatgatgccgaaatgctggcggaagagttacgtaagtttcccgccgagacggtgctttatcttggtgcgctaccggagctttctgtcagcttcctgcgtgaacaaggtttccgtactgcctggaaagatgatccgcgcgaagtgcatttcctgtatgccaacagctatgagcgggaggcggctgcccagttattcgaaaaatggctggaaacgcatccgatgccgcaggcgctgttcacaacgagctttgcgttgttgcaaggagtgatggatgtcacgctgcgtcgcgacggcaaactgccttctgacctggcaattgccacctttggcgataacgaactgctcgacttcttacagtgtccggtgctggcagtggctcaacgtcaccgcgatgtcgcagagcgtgtgctggagattgtcctggcaagcctggacgaaccgcgtaagccaaaacctggtttaacgcgcattaaacgtaatctctatcgccgcggcgtgctcagccgtagctaagccgcgaacaaaaatacgcgccaggtgaatttccctctggcgcgtagagtacgggactggacatcaatatgcttaaagtaaataagactattcctgactattattgataaatgcttttaaacccgcccgttaattaactcaccagctgaaattcacaataattaagtgatatcgacagcgcgtttttgcattattttgttacatgcggcgatgaattgccgatttaacaaacacttttctttgcttttgcgcaaacccgctggcatcaagcgccacacagacgtaacaaggactgttaaccggggaagatatgtcctaaaatgccgctcgcgtcgcaaactgacactttatatttgctgtggaaaatagtgagtcattttaaaacggtgatgacgatgagggattttttcttacagctattcataacgttaatttgcttcgcacgttggacgtaaaataaacaacgctgatattagccgtaaacatcgggttttttacctcggtatgccttgtgactggcttgacaagcttttcctcagctccgtaaactcctttcagtgggaaattgtggggcaaagtgggaataaggggtgaggctggcatgttccggggagcaacgttagtcaatctcgacagcaaagggcgcttaagtgtgcctacccgttatcgggaacagctgcttgagaacgctgccggtcaaatggtttgcaccattgacatttatcacccgtgcctgctgctttaccccctgcctgaatgggaaattatcgagcaaaaattaagccgtctgagcagcatgaacccggttgagcgccgtgtgcagcgcctactgttaggtcatgccagcgaatgtcagatggatggcgcaggtcgattgttaatcgcgccagtactgcggcaacatgccgggctgacaaaagaagtgatgctggttggacagttcaacaagtttgagctgtgggatgaaacaacctggcatcaacaggtcaaggaagatatcgacgcagagcagttggctaccggagacttaagcgagcgactgcaggacttgtctctataaaatgatggaaaactataaacatactacggtgctgctggatgaagccgttaatggcctcaatatccgtcctgatggcatctacattgatgggacttttggtcgcggtggtcacagtcgtctgatcctcagccagcttggcgaagaggggcgtttgctggcgatcgatcgcgacccgcaggctatcgccgttgcgaagactattgatgatccgcgcttctccatcatccacggacctttctccgcgctgggcgaatacgttgccgagcgcgatcttatcggcaagatcgacggcattctcctcgatcttggcgtctctagtccgcaacttgatgatgctgaacgtggcttttcctttatgcgcgatggtccgctggacatgcgtatggacccaacccgtgggcagagtgccgctgaatggctacaaaccgcagaagaagccgatatcgcctgggtattgaaaacctatggtgaagagcgttttgccaaacgcattgcccgcgccattgtcgagcgtaaccgcgaacagccgatgacccgcaccaaagaactggcggaagtcgtggctgctgcaacgccggtgaaagataagtttaaacatcccgcgacccgtaccttccaggcggtgcgcatttgggtaaacagtgaactggaggagatagagcaggcgctaaaaagcagcctcaacgtgctggccccgggtgggcggcttagcatcatcagcttccacagcctggaagaccgtattgtgaaacgttttatgcgtgaaaacagccgcggtccgcaagttccggcagggttaccgatgactgaagagcagctcaaaaaactgggtggccgtcagctgcgagcactaggcaagttaatgccgggcgaagaagaggtggctgagaaccctcgtgcccgtagtagtgttctgcgtattgcagagaggacgaatgcatgatcagcagagtgacagaagctctaagcaaagttaaaggaagcatgggaagccacgagcgccatgcattgcctggtgttatcggtgacgatcttttgcgatttgggaagctgccactctgcctgttcatttgcattattttgacggcggtgactgtggtaaccacggcgcaccatacccgtttactgaccgctcagcgcgaacaactggtgctggagcgagatgctttagacattgaatggcgcaacctgatccttgaagagaatgcgctcggcgaccatagccgggtggaaaggatcgccacggaaaagctgcaaatgcagcatgttgatccgagtcaagaaaatatcgtagtgcaaaaataaggataaacgcgacgcatgaaagcagcggcgaaaacgcagaaaccaaaacgtcaggaagaacatgccaactttatcagttggcgttttgcgttgttatgcggctgtattctcctggcgctggcttttctgctcggacgcgtagcgtggttacaagttatctccccggatatgctggtgaaagagggcgacatgcgttctcttcgcgttcagcaagtttccacctcccgcggcatgattactgaccgttctggtcgcccgttagcggtgagcgtgccggtaaaagcgatttgggctgacccgaaagaagtgcatgacgctggcggtatcagcgtcggtgaccgctggaaggcgctggctaacgcgctcaatattccgctggatcagcttagtgcccgcattaacgccaacccgaaagggcgctttatttatctggcgcgtcaggtgaaccctgacatggcggactacatcaaaaaactgaaactgccggggattcatctgcgtgaagagtctcgccgttactatccgtccggcgaagtgactgctcacctcatcggctttactaacgtcgatagtcaagggattgagggcgttgagaagagtttcgataaatggcttaccgggcagccgggtgagcgcattgtgcgtaaagaccgctatggtcgcgtaattgaagatatttcttctactgacagccaggcagcgcacaacctggcgctgagtattgatgaacgcctgcaggcgctggtttatcgcgaactgaacaacgcggtggcctttaacaaggctgaatctggtagcgccgtgctggtggatgtcaacaccggtgaagtgctggcgatggctaacagcccgagttacaaccctaacaatctgagcggcacgccgaaagaggcgatgcgtaaccgtaccatcaccgacgtgtttgaaccgggcagtacggttaaaccgatggtggtaatgaccgcgttgcaacgtggcgtggtgcgggaaaacagcgtactcaataccattccttatcgaattaacggccacgaaatcaaagacgtggcacgctacagcgaattaaccctgaccggggtattacagaagagcagtaacgtcggtgtttccaagctggcgttagcgatgccgtccagtgcgttagtagatacttacagtcgttttggactgggaaaagcgaccaatttggggttggtcggagaacgcagtggcttatatcctcaaaaacaacggtggtctgacatagagagggccaccttctctttcggctacgggctaatggtaacaccattacagttagcgcgagtctacgcaactatcggcagctacggcatttatcgcccactgagcattaccaaagttgaccccccggttcccggtgaacgtgtcttcccggaatccattgtccgcactgtggtgcatatgatggaaagcgtggcgctaccaggcggcggcggcgtgaaggcggcgattaaaggctatcgtatcgccattaaaaccggtaccgcgaaaaaggtcgggccggacggtcgctacatcaataaatatattgcttataccgcaggcgttgcgcctgcgagtcagccgcgcttcgcgctggttgttgttatcaacgatccgcaggcgggtaaatactacggcggcgccgtttccgcgccggtctttggtgccatcatgggcggcgtattgcgtaccatgaacatcgagccggatgcgctgacaacgggcgataaaaatgaatttgtgattaatcaaggcgaggggacaggtggcagaagctaaagcctgagcgcttcgcgctggttgttgttatcaacgatccgcaggcgggtaaatactacggcggcgccgtttccgcgccggtctttggtgccatcatgggcggcgtattgcgtaccatgaacatcgagccggatgcgctgacaacgggcgataaaaatgaatttgtgattaatcaaggcgaggggacaggtggcagatcgtaatttgcgcgaccttcttgctccgtgggtgccagacgcacctagccgagcactgcgagagatgacactcgacagccgtgtggctgcggcgggcgatctctttgtagctgtagtaggtcatcaggcggacgggcgtcgatatatcccgcaggcgatagcgcaaggtgtggctgccattattgcagaggcgaaagatgaggcgaccgatggtgaaatccgtgaaatgcacggcgtaccggtcatctatctcagccagctcaacgagcgtttatctgcactggcgggccgcttttaccatgaaccctctgacaatttacgtctcgtgggcgtaacgggcaccaacggcaaaaccacgactacccagctgttggcgcagtggagccaactgcttggcgaaatcagcgcggtaatgggcaccgttggtaacggcctgctggggaaagtgatcccgacagaaaatacaaccggtagcgcagtcgatgttcagcatgagctggcggggctggtggatcagggcgcgacgttttgcgcaatggaagtttcctcccacgggctggtacagcaccgtgtggcggcattgaaatttgcggcgagcgtctttaccaacttaagccgcgatcaccttgattatcatggtgatatggaacactacgaagccgcgaaatggctgctttattctgagcatcattgcggtcaggcgattattaacgccgacgatgaagtgggccgccgctggctggcaaaactgccggacgcggttgcggtaagtatggaagatcatattaatccgaactgtcacggacgctggttgaaagcgaccgaagtgaactatcacgacagcggtgcgacgattcgctttagcagtagttggggcgatggcgaaattgaaagccatctgatgggcgcttttaacgtcagcaacctgctgctcgcgctggcgacactgttggcactcggctatccactggctgatctgctgaaaaccgccgcgcgtctgcaaccggtttgcggacgtatggaagtgttcactgcgccaggcaaaccgacggtggtggtggattacgcgcatacgccggatgcactggaaaaagccttacaggcggcgcgtctgcactgtgcgggcaagctgtggtgtgtctttggctgtggtggcgatcgcgataaaggtaagcgtccactgatgggcgcaattgccgaagagtttgctgacgtggcggtggtgacggacgataacccgcgtaccgaagaaccgcgtgccatcatcaacgatattctggcgggaatgttagatgccggacatgccaaagtgatggaaggccgtgctgaagcggtgacttgcgccgttatgcaggctaaagagaatgatgtggtactggtcgcgggcaaaggccatgaagattaccagattgttggcaatcagcgtctggactactccgatcgcgtcacggtggcgcgtctgctgggggtgattgcatgattagcgtaacccttagccaacttaccgacattctcaacggtgaactgcaaggtgcagatatcacccttgatgctgtaaccactgatacccgaaaactgacgccgggctgcctgtttgttgccctgaaaggcgaacgttttgatgcccacgattttgccgaccaggcgaaagctggcggcgcaggcgcactactggttagccgtccgctggacatcgacctgccgcagttaatcgtcaaggatacgcgtctggcgtttggtgaactggctgcatgggttcgccagcaagttccggcgcgcgtggttgctctgacggggtcctccggcaaaacctccgttaaagagatgacggcggcgattttaagccagtgcggcaacacgctttatacggcaggcaatctcaacaacgacatcggtgtaccgatgacgctgttgcgcttaacgccggaatacgattacgcagttattgaacttggcgcgaaccatcagggcgaaatagcctggactgtgagtctgactcgcccggaagctgcgctggtcaacaacctggcagcggcgcatctggaaggttttggcagccttgcgggtgtcgcgaaagcgaaaggtgaaatctttagcggcctgccggaaaacggtatcgccattatgaacgccgacaacaacgactggctgaactggcagagcgtaattggcagtcgcaaagtgtggcgtttcagtcccaatgccgccaacagcgatttcaccgccaccaatatccatgtgaccagccacggtacggaatttaccctacaaaccccaaccggtagcgtcgatgttctgctgccgttgccggggcgtcacaatattgcgaatgcgctggcagccgctgcgctctccatgtccgtgggcgcaacgcttgatgctatcaaagcggggctggcaaatctgaaagctgttccaggccgtctgttccccatccaactggcagaaaaccagttgctgctcgacgactcctacaacgccaatgtcggtagtatgactgcagcagtccaggtactggctgaaatgccgggctaccgcgtgctggtggtgggcgatatggcggaactgggcgctgaaagcgaagcctgccatgtacaggtgggcgaggcggcaaaagctgctggtattgaccgcgtgttaagcgtgggtaaacaaagccatgctatcagcaccgccagcggcgttggcgaacattttgctgataaaactgcgttaattacgcgtcttaaattactgattgctgagcaacaggtaattacgattttagttaagggtagtcgtagtgccgccatggaagaggtagtacgcgctttacaggagaatgggacatgttaatataagctttacaggagaatgggacatgttagtttggctggccgaacatttggtcaaatattattccggctttaacgtcttttcctatctgacgtttcgcgccatcgtcagcctgctgaccgcgctgttcatcagtttgtggatgggcccgcgtatgattgctcatttgcaaaaactttcctttggtcaggtggtgcgtaacgacggtcctgaaagtcacttcagcaagcgcggtacgccgaccatgggcgggattatgatcctgacggcgattgtgatctccgtactgctgtgggcttacccgtccaatccgtacgtctggtgcgtgttggtggtgctggtaggttacggtgttattggctttgttgatgattatcgcaaagtggtgcgtaaagacaccaaagggttgatcgctcgttggaagtatttctggatgagcgtcattgcgctgggtgtcgccttcgccctgtaccttgccggcaaagacacgcccgcaacgcagctggtggtcccattctttaaagatgtgatgccgcagctggggctgttctacattctgctggcttacttcgtcattgtgggtactggcaacgcggtaaacctgaccgatggtctcgacggcctggcaattatgccgaccgtatttgtcgccggtggttttgcgctggtggcgtgggcgaccggcaatatgaactttgccagctacttgcatataccgtatctgcgacacgccggggaactggttattgtctgtaccgcgatagtcggggcaggactgggcttcctgtggtttaacacctatccggcgcaggtctttatgggcgatgtaggtagcctggcgttaggtggtgcgttaggcattatcgccgtactgctacgtcaggaattcctgctggtgattatggggggcgtgttcgtggtagaaacgctttctgtcatcctgcaggtcggctcctttaaactgcgcggacaacgtattttccgcatggcaccgattcatcaccactatgaactgaaaggctggccggaaccgcgcgtcattgtgcgtttctggattattagcctgatgctggttctgattggtctggcaacgctgaaggtacgttaatcatggctgattatcagggtaaaaatgtcgtcattatcggcctgggcctcaccgggctttcctgcgtggactttttcctcgctcgcggtgtgacgccgcgcgttatggatacgcgtatgacaccgcctggcctggataaattacccgaagccgtagaacgccacacgggcagtctgaatgatgaatggctgatggcggcagatctgattgtcgccagtcccggtattgcactggcgcatccatccttaagcgctgccgctgatgccggaatcgaaatcgttggcgatatcgagctgttctgtcgcgaagcacaagcaccgattgtggcgattaccggttctaacggcaaaagcacggtcaccacgctagtgggtgaaatggcgaaagcggcgggggttaacgttggtgtgggtggcaatattggcctgcctgcgttgatgctactggatgatgagtgtgaactgtacgtgctggaactgagcagcttccagctggaaaccacctccagcttacaggcggtagcagcgaccattctgaacgtgactgaagatcatatggatcgctatccgtttggtttacaacagtatcgtgcagcaaaactgcgcatttacgaaaacgcgaaagtttgcgtggttaatgctgatgatgccttaacaatgccgattcgcggtgcggatgaacgctgcgtcagctttggcgtcaacatgggtgactatcacctgaatcatcagcagggcgaaacctggctgcgggttaaaggcgagaaagtgctgaatgtgaaagagatgaaactttccgggcagcataactacaccaatgcgctggcggcgctggcgctggcagatgctgcagggttaccgcgtgccagcagcctgaaagcgttaaccacattcactggtctgccgcatcgctttgaagttgtgctggagcataacggcgtacgttggattaacgatagcaaagcgaccaacgtcggcagtacggaagcggcgctgaatggcctgcacgtagacggcacactgcatttgttgctgggtggcgatggtaaaagcgcggactttagcccactggcgcgttacctgaatggcgataacgtacgtctgtattgtttcggtcgtgacggcgcgcagctggcggcgctacgtccggaagtggcagaacaaaccgaaactatggaacaggcgatgcgcttgctggctccgcgtgttcagccgggcgatatggttctgctctccccagcctgtgccagccttgatcagttcaagaactttgaacaacgaggcaatgagtttgcccgtctggcgaaggagttaggttgatgcgtttatctctccctcgcctgaaaatgccgcgcctgccaggattcagtatcctggtctggatctccacggcgctaaagggctgggtgatgggcagccgggaaaaagataccgacagcctgatcatgtacgatcgcaccttactgtggctgaccttcggcctcgcggcgattggctttatcatggtgaccagcgcgagtatgcccatagggcaacgcttaaccaacgatccgttcttcttcgcgaagcgtgatggtgtctatctgattttggcgtttattctggcgatcattacgctgcgtctgccgatggagttctggcaacgctacagtgccacgatgctgctcggatctatcatcctgctgatgatcgtcctggtagtgggtagcagcgttaaaggggcaagccgttggatcgatctcggtttgctgcgtatccagcctgcggagctgacaaaactgagcctgttttgctatatcgccaactatctggtgcgtaaaggcgacgaagtacgtaataacctgcgcggcttcctgaaaccgatgggcgtgattctggtgttggcagtgttactgctggcacagccagaccttggtacggtggtggtgttgtttgtgactacgctggcgatgttgttcctggcgggagcgaaattgtggcagttcattgccattatcggtatgggcattagtgcggttgtgttgctgatactcgccgaaccgtaccgtatccgccgtgttaccgcattctggaacccgtgggaagatccctttggcagcggctatcagttaacgcaaagcctgatggcgtttggtcgcggcgaactttgggggcaaggtttaggtaacagcgtacaaaaactggagtatctgccggaagcgcacactgactttattttcgccattatcggcgaagaactggggtatgtcggtgtggtgctggcacttttaatggtattcttcgtcgcttttcgcgcgatgagcattggccgtaaagcattagaaattgaccaccgtttttccggttttctcgcctgttctattggcatctggtttagcttccaggcgctggttaacgtaggcgcggcggcggggatgttaccgaccaaaggtctgacattgccgctgatcagttacggtggtagcagcttactgattatgagcacagccatcatgatgctgttgcgtattgattatgaaacgcgtctggagaaagcgcaggcgtttgtacgaggtagtcgatgagtggtcaaggaaagcgattaatggtgatggcaggcggaaccggtggacatgtattcccgggactggcggttgcgcaccatctaatggctcagggttggcaagttcgctggctggggactgccgaccgtatggaagcggacttagtgccaaaacatggcatcgaaattgatttcattcgtatctctggtctgcgtggaaaaggtataaaagcactgatagctgccccgctgcgtatcttcaacgcctggcgtcaggcgcgggcgattatgaaagcgtacaaacctgacgtggtgctcggtatgggaggctacgtgagtggtccaggtggtctggccgcgtggagcttaggcattccggttgtacttcatgaacaaaacggtattgcgggcttaaccaataaatggctggcgaagattgccaccaaagtgatgcaggcgtttccaggtgctttccctaatgcggaagtagtgggtaacccggtgcgtaccgatgtgttggcgctgccgttgccgcagcaacgtttggctggacgtgaaggtccggttcgtgtgctggtagtgggtggttctcagggcgcacgcattcttaaccagacaatgccgcaggttgctgcgaaactgggtgatagtgtcactatctggcatcagagcggcaaaggtagccaacaatccgttgaacaggcgtatgccgaagcggggcaaccgcagcataaagtgacggaatttattgatgatatggcggcggcgtatgcgtgggcggatgtcgtcgtttgccgctccggtgcgttaacggtgagtgaaatcgccgcggcaggactaccggcgttgtttgtgccgtttcaacataaagaccgccagcaatactggaatgcgctaccgctggaaaaagcgggcgcagccaaaattatcgagcagccacagcttagcgtggatgctgtcgccaacaccctggccgggtggagccgagaaaccttattaaccatggcagaacgcgcccgcgctgcatccattccggatgccaccgagcgagtggcaaatgaagtgagccgggttgcccgggcgtaattgtagcgatgccttttgcatcgtatgaatttaagaagttaatggcgtaaagaatgaatacacaacaattggcaaaactgcgttccatcgtgcccgaaatgcgtcgcgttcggcacatacattttgtcggcattggtggtgccggtatgggcggtattgccgaagttctggccaatgaaggttatcagatcagtggttccgatttagcgccaaatccggtcacgcagcagttaatgaatctgggtgcgacgatttatttcaaccatcgcccggaaaacgtacgtgatgccagcgtggtcgttgtttccagcgcgatttctgccgataacccggaaattgtcgccgctcatgaagcgcgtattccggtgatccgtcgtgccgaaatgctggctgagttaatgcgttttcgtcatggcatcgccattgccggaacgcacggcaaaacgacaaccaccgcgatggtttccagcatctacgcagaagcggggctcgacccaaccttcgttaacggcgggctggtaaaagcggcgggggttcatgcgcgtttggggcatggtcggtacctgattgccgaagcagatgagagtgatgcaagcttcctgcatctgcaaccgatggtggcgattgtcaccaatatcgaagccgaccacatggatacctaccagggcgactttgagaatttaaaacagacttttattaattttctgcacaacctgccgttttacggtcgtgcggtgatgtgtgttgatgatccggtgatccgcgaattgttaccgcgagtggggcgtcagaccacgacttacggcttcagcgaagatgccgacgtgcgtgtagaagattatcagcagattggcccgcaggggcactttacgctgctgcgccaggacaaagagccgatgcgcgtcaccctgaatgcgccaggtcgtcataacgcgctgaacgccgcagctgcggttgcggttgctacggaagagggcattgacgacgaggctattttgcgggcgcttgaaagcttccaggggactggtcgccgttttgatttcctcggtgaattcccgctggagccagtgaatggtaaaagcggtacggcaatgctggtcgatgactacggccaccacccgacggaagtggacgccaccattaaagcggcgcgcgcaggctggccggataaaaacctggtaatgctgtttcagccgcaccgttttacccgtacgcgcgacctgtatgatgatttcgccaatgtgctgacgcaggttgataccctgttgatgctggaagtgtatccggctggcgaagcgccaattccgggagcggacagccgtagcctgtgtcgcacaattcgtggacgtgggaaaattgatcccattctggtgccggatccggcgcgggtagccgagatgctggcaccggtattaaccggtaacgacctgattctcgttcagggggctggtaatattggaaaaattgcccgttctttagctgaaatcaaactgaagccgcaaactccggaggaagaacaacatgactgataaaatcgcggtcctgttgggtgggacctccgctgagcgggaagtttctctgaattctggcgcagcggtgttagccggactgcgtgaaggcggtattgacgcgtatcctgtcgacccgaaagaagtcgacgtgacgcaactgaagagcatgggctttcagaaagtgtttatcgcgctacacggtcgcggcggtgaagatggtacgctgcaggggatgctcgagctgatgggcttgccttataccggaagcggagtgatggcatctgcgcttagtatggataaactacgcagcaaacttctatggcaaggtgccggtttaccggtcgcgccgtgggtagcgttaacccgcgcagagtttgaaaaaggcctgagcgataagcagttagcagaaatttctgctctgggtttgccggttatcgttaagccgagccgcgaaggttccagtgtgggaatgagtaaagtagtagcagaaaatgctctacaagatgcattaagattggcatttcagcacgatgaagaagtattgattgaaaaatggctaagtgggccggagttcacggttgcgatactcggtgaagaaattttaccgagtatacgtattcaaccgtccggaaccttctatgattatgaggcgaagtatctctctgatgagacacagtatttctgccccgcaggtctggaagcgagtcaagaggccaatttgcaggcattagtgctgaaagcatggacgacgttaggttgcaaaggatggggacgtattgacgttatgctggacagcgatggacagttttatctgctggaagccaataccagtccgggtatgaccagccacagcctggtgccgatggcggcacgtcaggcaggtatgagcttcagccagttggtagtacgaattctggaactggcggactaatatgagccaggctgctctgaacacgcgaaacagcgaagaagaggtttcttctcgccgcaataatggaacgcgtctggcggggatccttttcctgctgaccgttttaacgacagtgttggtgagcggctgggtcgtgttgggctggatggaagatgcgcaacgcctgccgctcagtaagctggtgttgaccggtgaacgccattacacacgtaatgacgatatccggcagagcatcctggcattgggtgagccgggtacctttatgacccaggatgtcaacatcatccagacgcaaatagaacaacgcctgccgtggattaagcaggtgagcgtcagaaagcagtggcctgatgaattgaagattcatctggttgaatatgtgccgattgcgcggtggaatgatcaacatatggtagacgcggaaggaaataccttcagcgtgccgccagaacgcaccagcaagcaggtgcttccaatgctgtatggcccggaaggcagcgccaatgaagtgttgcagggctatcgcgaaatggggcagatgctggcaaaggacagatttactctgaaggaagcggcgatgaccgcgcggcgttcctggcagttgacgctgaataacgatattaagctcaatcttggccggggcgatacgatgaaacgtttggctcgctttgtagaactttatccggttttacagcagcaggcgcaaaccgatggcaaacggattagctacgttgatttgcgttatgactctggagcggcagtaggctgggcgcccttgccgccagaggaatctactcagcaacaaaatcaggcacaggcagaacaacaatgatcaaggcgacggacagaaaactggtagtaggactggagattggtaccgcgaaggttgccgctttagtaggggaagttctgcccgacggtatggtcaatatcattggcgtgggcagctgcccgagccgtggtatggataaaggcggggtgaacgacctcgaatccgtggtcaagtgcgtacaacgcgccattgaccaggcagaattgatggcagattgtcagatctctagcgtatatctggcgctttctggtaagcacatcagctgccagaatgaaattggtatggtgcctatttctgaagaagaagtgacgcaagaagatgtggaaaacgtcgtccataccgcgaaaagcgtgcgtgtgcgcgatgagcatcgtgtgctgcatgtgatcccgcaagagtatgcgattgactatcaggaagggatcaagaatccggtaggacttagcggcgtgcggatgcaggcaaaagtgcacctgatcacatgtcacaacgatatggcgaaaaacatcgtcaaagcggttgaacgttgtgggctgaaagttgaccaactgatatttgccggactggcaagtagttatagcgtattgacggaagatgaacgtgaactgggtgtctgcgtcgtcgatatcggtggtggtacaatggatatcgccgtttataccggtggggcattgcgccacactaaggtaattccttatgctggcaatgtcgtgaccagtgatatcgcttacgcctttggcacgccgccaagcgacgccgaagcgattaaagttcgccacggttgtgcgctgggttccatcgttggaaaagatgagagcgtggaagtgccgagcgtaggtggtcgtccgccacggagtctgcaacgtcagacactggcagaggtgatcgagccgcgctataccgagctgctcaacctggtcaacgaagagatattgcagttgcaggaaaagcttcgccaacaaggggttaaacatcacctggcggcaggcattgtattaaccggtggcgcagcgcagatcgaaggtcttgcagcctgtgctcagcgcgtgtttcatacgcaagtgcgtatcggcgcgccgctgaacattaccggtttaacggattatgctcaggagccgtattatagcacggcggtgggattgcttcactatgggaaagagagtcatcttaacggtgaagctgaagtagaaaaacgtgttacagcaagtgttggcagctggatcaagcgactcaatagttggctgcgaaaagagttttaatttttatgaggccgacgatgattacggcctcaggcgacaggcacaaatcggagagaaactatgtttgaaccaatggaacttaccaatgacgcggtgattaaagtcatcggcgtcggcggcggcggcggtaatgctgttgaacacatggtgcgcgagcgcattgaaggtgttgaattcttcgcggtaaataccgatgcacaagcgctgcgtaaaacagcggttggacagacgattcaaatcggtagcggtatcaccaaaggactgggcgctggcgctaatccagaagttggccgcaatgcggctgatgaggatcgcgatgcattgcgtgcggcgctggaaggtgcagacatggtctttattgctgcgggtatgggtggtggtaccggtacaggtgcagcaccagtcgtcgctgaagtggcaaaagatttgggtatcctgaccgttgctgtcgtcactaagcctttcaactttgaaggcaagaagcgtatggcattcgcggagcaggggatcactgaactgtccaagcatgtggactctctgatcactatcccgaacgacaaactgctgaaagttctgggccgcggtatctccctgctggatgcgtttggcgcagcgaacgatgtactgaaaggcgctgtgcaaggtatcgctgaactgattactcgtccgggtttgatgaacgtggactttgcagacgtacgcaccgtaatgtctgagatgggctacgcaatgatgggttctggcgtggcgagcggtgaagaccgtgcggaagaagctgctgaaatggctatctcttctccgctgctggaagatatcgacctgtctggcgcgcgcggcgtgctggttaacatcacggcgggcttcgacctgcgtctggatgagttcgaaacggtaggtaacaccatccgtgcatttgcttccgacaacgcgactgtggttatcggtacttctcttgacccggatatgaatgacgagctgcgcgtaaccgttgttgcgacaggtatcggcatggacaaacgtcctgaaatcactctggtgaccaataagcaggttcagcagccagtgatggatcgctaccagcagcatgggatggctccgctgacccaggagcagaagccggttgctaaagtcgtgaatgacaatgcgccgcaaactgcgaaagagccggattatctggatatcccagcattcctgcgtaagcaagctgattaagaattgactggaatttgggtttcgaggctctttgtgctaaactggcccgccgaatgtatagtacacttcggttggataggtaatttggcgagataatacgatgatcaaacaaaggacacttaaacgtatcgttcaggcgacgggtgtcggtttacataccggcaagaaagtcaccctgacgttacgccctgcgccggccaacaccggggtcatctatcgtcgcaccgacttgaatccaccggtagatttcccggccgatgccaaatctgtgcgtgataccatgctctgtacgtgtctggtcaacgagcatgatgtacggattagtaccgtagagcacctcaatgctgctctcgcgggcttgggcatcgataacattgttatcgaagttaacgcgccggaaatcccgatcatggacggcagcgccgctccgtttgtatacctgctgcttgacgccggtatcgacgagttgaactgcgccaaaaaatttgttcgcatcaaagagactgttcgtgtcgaagatggcgataagtgggctgaatttaagccgtacaatggttttagcctggatttcaccatcgattttaaccatccggctattgattccagcaaccagcgctatgcgatgaacttctccgctgatgcgtttatgcgccagatcagccgtgcgcgtacgttcggtttcatgcgtgatatcgaatatctgcagtcccgtggtttgtgcctgggcggcagcttcgattgtgccatcgttgttgacgattatcgcgtactgaacgaagacggcctgcgttttgaagacgaatttgtgcgtcacaaaatgctcgatgcgatcggtgacttgttcatgtgtggtcacaatattattggtgcatttaccgcttataaatccggtcatgcactgaataacaaactgctgcaggctgtcctggcgaaacaggaagcctgggaatatgtgaccttccaggacgacgcagaactgccgttggccttcaaagcgcctagtgctgtactggcataacgacatttatactgtcgtataaaattcgactggcaaatctggcactctctccggccaggtgaaccagtcgtttttttttgaattttataagagctataaaaaacggtgcgaacgctgttttcttaagcacttttccgcacaacttatcttcattcgtgctgtggactgcaggctttaatgataagatttgtgcgctaaatacgtttgaatatgatcgggatggcaataacgtgagtggaatactgacgcgctggcgacagtttggtaaacgctacttctggccgcatctcttattagggatggttgcggcgagtttaggtttgcctgcgctcagcaacgccgccgaaccaaacgcgcccgcaaaagcgacaacccgcaaccacgagcctagtgccaaagttaactttggtcaattggccttgctggaagcgaacacacgccgcccgaatagcaactattccgttgattactggcatcaacatgccattcgcacggtaatccgtcatctttctttcgcaatggcaccgcaaacactgcccgttgctgaagaatctttgcctcttcaggcgcaacatcttgcattactggatacgctcagcgcgctgctgacccaggaaggcacgccgtctgaaaagggttatcgcattgattatgcgcattttaccccacaagcaaaattcagcacgcccgtctggataagccaggcgcaaggcatccgtgctggccctcaacgcctcacctaacaacaataaacctttacttcattttattaactccgcaacgcggggcgtttgagattttattatgctaatcaaattgttaactaaagttttcggtagtcgtaacgatcgcaccctgcgccggatgcgcaaagtggtcaacatcatcaatgccatggaaccggagatggaaaaactctccgacgaagaactgaaagggaaaaccgcagagtttcgtgcacgtctggaaaaaggcgaagtgctggaaaatctgatcccggaagctttcgccgtggtacgtgaggcaagtaagcgcgtctttggtatgcgtcacttcgacgttcagttactcggcggtatggttcttaacgaacgctgcatcgccgaaatgcgtaccggtgaaggaaaaaccctgaccgcaacgctgcctgcttacctgaacgcactaaccggtaaaggcgtgcacgtagttaccgtcaacgactacctggcgcaacgtgacgccgaaaacaaccgtccgctgtttgaattccttggcctgactgtcggtatcaacctgccgggcatgccagcaccggcaaagcgcgaagcttacgcagctgacatcacttacggtacgaacaacgaatacggctttgactacctgcgcgacaacatggcgttcagccctgaagaacgtgtacagcgtaaactgcactatgcgctggtggacgaagtggactccatcctgatcgatgaagcgcgtacaccgctgatcatttccggcccggcagaagacagcagcgaaatgtataaacgcgtgaataaaattattccgcacctgatccgtcaggaaaaagaagactccgaaaccttccagggcgaaggccacttcagcgtggacgaaaaatctcgccaggtgaacctgaccgaacgtggtctggtgctgattgaagaactgctggtgaaagagggcatcatggatgaaggggagtctctgtactctccggccaacatcatgctgatgcaccacgtaacggcggcgctgcgcgctcatgcgctgtttacccgtgacgtcgactacatcgttaaagatggtgaagttatcatcgttgacgaacacaccggtcgtaccatgcagggccgtcgctggtccgatggtctgcaccaggctgtggaagcgaaagaaggtgtgcagatccagaacgaaaaccaaacgctggctagcatcaccttccagaactacttccgtctgtatgaaaaactggcggggatgaccggtactgctgataccgaagctttcgaatttagcagtatctacaagctggataccgtcgttgttccgaccaaccgtccaatgattcgtaaagatctgccggacctggtctacatgactgaagcggaaaaaattcaggcgatcattgaagatatcaaagaacgtactgcgaaaggccagccggtgctggtgggtactatctccatcgaaaaaagcgagctggtgagtaacgaactgaccaaagccggtattaagcacaacgtcctgaacgccaaattccacgccaacgaagcggcgattgttgctcaggcaggttatccggctgcggtgactatcgcgaccaatatggcgggtcgtggtacagatattgtgctcggtggtagctggcaggcagaagttgccgcgctggaaaatccgaccgcagagcaaattgaaaaaattaaagccgactggcaggtacgtcacgatgcggtactggaagcaggtggcctgcatatcatcggtaccgagcgtcacgaatcccgtcgtatcgataaccagttgcgcggtcgttctggtcgtcagggggatgctggttcttcccgtttctacctgagcatggaagatgcgctgatgcgtatttttgcttccgaccgagtatccggcatgatgcgtaaactgggtatgaagccaggcgaagccattgaacacccgtgggtgactaaagcgattgccaacgcccagcgtaaagttgaaagccgtaacttcgacattcgtaagcaactgctggaatatgatgacgtggctaacgatcagcgtcgcgccatttactcccagcgtaacgaactgttggatgtcagcgatgtgagcgaaaccattaacagcattcgtgaagatgtgttcaaagcgaccattgatgcctacattccaccacagagcctggaagaaatgtgggatattccggggctgcaggaacgtctgaagaacgatttcgacctcgatttgccaattgccgagtggctggataaagaaccagaactgcatgaagagacgctgcgtgagcgcattctggcgcagtccatcgaagtgtatcagcgtaaagaagaagtggttggtgctgagatgatgcgtcacttcgagaaaggcgtcatgctgcaaacgcttgactccctgtggaaagagcacctggcagcgatggactatctgcgtcagggtatccacctgcgtggctacgcacagaaagatccgaagcaggaatacaaacgtgaaagcttctccatgtttgcagcgatgctggagagcttgaaatatgaagttatcagtacgctgagcaaagttcaggtacgtatgcctgaagaggttgaggagctggaacaacagcgtcgtatggaagccgagcgtttagcgcaaatgcagcagcttagccatcaggatgacgactctgcagccgcagctgcactggcggcgcaaaccggagagcgcaaagtaggacgtaacgatccttgcccgtgcggttctggtaaaaaatacaagcagtgccatggccgcctgcaataaaagctaactgttgaagtaaaaggcgcaggattctgcgccttttttataggtttaagacaatgaaaaagctgcaaattgcggtaggtattattcgcaacgagaacaatgaaatctttataacgcgtcgcgcagcagatgcgcacatggcgaataaactggagtttcccggcggtaaaattgaaatgggtgaaacgccggaacaggcggtggtgcgtgaacttcaggaagaagtcgggattaccccccaacattttagcctatttgaaaaactggaatatgaattcccggacaggcatataacactgtggttttggctggtcgaacgctgggaaggggagccgtggggtaaagaagggcaacccggtgagtggatgagcctggtcggtcttaatgccgatgattttccgccagccaatgaaccggtaattgcgaagcttaaacgtctgtaagtcagataaggcgttttcgccgcatccgacattcgcacacgatgcctgatgcgacgctggcgcgtcttatcaggcctaaagggatttctaactcattgataaatttgtttttgtaggtcggataaggcgttcacgccgcatccgacatttgcacaagatgcctgatgcgacgctgtccgcgtcttatcaggcctacgtgcggcatcagacaaatgtcactgctttggttcttcgctccagtcatcgctttcggaaagatcgccactgctggggattcgtttttcttcagcagcccattctccgaggtcgatcagctgacaacgtttggagcaaaatggccgaaacgggctgatttcaccccacaccaccgttttcccgcaggttgggcaattcaccgtaatagtttcactcatttttactccttagcaacaggccagttcgaaatccagacgttccggtacctgtccgttttcagtgtccagcggcataaaacgaatggcaaaacggctcttatgtccggaaatttgcggataaagctgactatcgaggctcagattcaggcgcagcaagtcggcatcgccaccgttatcctgataaaaaccattcaggctggtttgtttacggaagggggcgctctggcgaattaaatccagcaccatggtaagtgcctgggtgagcgggttcaggctggcaatccaggtttctacctggctgtcgcgctgcgcctggggtagatgcagccaaatgtgcaatgtaggtaaatcaaagctgcaacagccgcctgggatgctcagtcgctgacgcaccagagcaatcaaacgatcttcacgcagaaattgcccgatacgcggcgcggaaattaatacgctccccgccgcttttaactgctgaattaatgcttcaatacggctctggtccacgccaggcacgccaatccaggtctggagtttacgttgctgccggtcaagttctttcaacagctcagtgcggacttcgccgcgctcgaaaacatccagtaattcactgacattacggaagaaatgcagcgcgccagcgtggtcaacgatgggtaaattaacggtgagttgctgaatcaaaaactcaatgcgcagccatgtacgcattttttcatttagtggatgttcaaaaaggacctgggtctgcattacggtttttcctgactgacaaactggctcgcaagctgcaaatagtgtgcgtgcaggcgggcaacatcgcttgcgatagcatccggtgcgccgttattatcaatgacgtcatctgccacggcaaggcgggcttcgcgcgttgcctgagcagcaaggatttgttcgacatgctcgcgagttacatcatcgcgctgcatggtgcgcttaagttgcgtttctgggctgacatccaccacaagcactcgattcgcttttttatacagactgttttctaccagcaatggcacaacccacagtacatagggggaagtagcttgctggatctggtgttgcgtctcttgctgaatcagcggatgcagcagggcgttaagccagtttttctcttccgggttggcgaagatccgctcgcgcaaggcccggcgctgcaatgttccatcagcagcaatcatgttagcgccaaagtgatcagcaatggcatgtagcgcaggtgcacctggttcaaccacctgacgcgcaataatatcggcatcaatgacgttaattccgagatcagcaaacgcattggcaacggtactcttgccactgccaatgcctcccgttaaggcaactatatacctcataatttatattcccgggaattcatcatgattatcaaaacgttaaaaatgagtgcacgaaagcgaaattgatgaaacgttcgctcactatttaccaggtaaatttatgggattgtagcgtaaaaaaagacaatttcgcagtcttgcgccgcattgattagtgcgtatgatagcgtcactggagttgcgctcttacccttatagccattaaccccaggaatccgcacatgcgtattgaagaagatctgaagttaggttttaaagacgttctcatccgccctaaacgctccactcttaaaagccgttccgatgttgaactggaacgtcaattcaccttcaaacatagtggtcagagctggtccggcgtgccgattatcgccgcaaatatggacaccgtaggcacattttctatggcctctgcgctggcttcttttgatattttgactgctgtgcataaacactattctgtcgaagagtggcaagcgtttatcaacaattcttccgctgatgtgctgaaacatgtgatggtttctaccggtacgtctgatgcggatttcgaaaaaactaaacagattctcgacctgaacccggcattaaacttcgtttgtattgacgtggcgaatggttattccgaacacttcgtgcagttcgttgcgaaagcgcgtgaagcgtggccgaccaaaaccatttgtgctggtaacgtagtgactggtgaaatgtgtgaggagcttatcctcagtggtgccgatatcgttaaagttggcattggcccaggttctgtttgtacaactcgcgtcaaaacaggcgtcggttatccgcaactttctgcggtaatcgaatgtgccgatgctgcgcacggtctgggcggaatgatcgtcagcgatggtggctgcaccacgccgggcgatgtggcgaaagcctttggcggcggtgccgatttcgtcatgcttggcggcatgctggcgggccacgaagagagcggcggtcgcatcgttgaggagaacggcgagaaatttatgctgttctacggcatgagctccgagtctgcgatgaaacgtcacgttggcggcgttgcggaatatcgcgcagcagaaggtaaaaccgttaagctgccgctgcgaggcccggttgaaaataccgcgcgagatattttgggcggcctgcgtagtgcttgtacatacgttggggctagtcgcctgaaagagctgaccaagcgcaccacgtttattcgtgtgcaggaacaagaaaaccgcatcttcaacaacctgtaatctcccaacgctggcgtggagcaacacgccagcgttatcccatcccactcatcgcatcgcctaaatggaaaattggcagatacattgccaccaccagcgtaccaataattcctcccgttatgatcagcaacgccggttccagtaaggctgcgaggttatccgccagcgccattgtgttttcccgatgatgatgggcgaggttgtctaacatgagatccagagagccggatgcctctcctgttctcactaattgcaaacagagcgggctaaactcaccggtattttttagcgccagccagatgggttgaccgttactgatatcgtgctggatttgtgtcagaagttgcacccagtacgggcagcgcattgtttctctgacgctctctacgccctgtaaaaaagtaatgcctgcactttgtgtcagcgccagaatcgtaaagatctgcgtgagtttttgtccccgcatcagactacccataatcgggatgcgtaacagcaatttctgccgcactataagccaggtcggtcggcgcatcagcaacttattggctatcgccagcagaaagccgaacaacaccagcagccagctccattcgccactaaagtctgccagcgtcatgatcccctgcgttagtgccggtagtggggtgttgaaggtcttatagatagcggcaaactccggcagaacaaaatgcagcattgccacaaccaccatgattgccatcgctaaaatgatgatgggataacgtaacgcacttttcactttgtcggtcaactgacgctgggctttttgctgacgcgccagttcaaagcagcattcatccagcttaccggtcagttcacccgtgcggatcatcgcctgatagagcggcggaaatacctcactccagggtaataaggcattggaaaaagcaatgccctgttcgagatcgtgcgccaggctttgcagcaacgcttgccattgcttactgggatgctgttccgccagcagagccagcccttcagaaagcgttaaccctgctttgagtagcgtcgccagttgatgaatgacttccgcgcttttatctcctcgccactgcgcagaattgatggcgattcgcttcaggcttagtggggtaaccatctgttgctgtagtgccataagcagtaaagtacggctctctgcccatagcatcccatcttgcgcattgccgtcgccggttatgccatgccagcgccagagttgcttactcgccatgcggcatcctcagtacgcggattaactcttcaaaggtggttaagccttgctctacggccaggcagccgttttcaaaaagcgtacgcatacccgcctgtcgtgcgtgcgtttccaggctttcaacgtcggtattagcggaaataagctgacgaatgaccggcgttatgggcagaacttcaaataaggccgtacgaccataaaaaccgtggtagcaatgtacacaaccgggtgcctgccagtggggcagcgggcttggccatacattgtctggaatgtggatgggctccccttgctgccggcgacaatgtgggcaaagtttgcgtaccagacgctgggctattaccagcgtaagcgcgctacttagcatccagcgggcgacccccatttgctgtaaacgtaccagcgtttcgcaggtggaattagtgtgtagggtagacaacaccaggtgaccagtttgcgccgctttaatagcgatctctgctgtttcgccatcgcggatctctccgatcatgatgacgtcaggatcctggcgcaataacgcacgcaaaacgccctgaaaggtgagtccggcacgcggatggatttgcgtctggtttagtccggctatggggatctcaactggatcttcgacgctacaaatattaatgtcagcggtattcagcttttgcagggcactataaagcgtgaccgttttgccgctgccggtagggccagttaccagcaccagtccctgtggttgttgcaaggcatgagcaaagtccgccagttgtaacggctgcattccaagcgtgttgacatccagtgcctgacccacctgctgtaacaaccttaataccaccttttcaccaccccgacatggtaaggtcgcaatacgaaaactgacggcgtttcctgccagttcgacagtgaattgcccgtcctgcggcaggcgatgttccgcaatatccaggtttcccagcacttttaatctggcggttaatgcgactccggcatccggactaacatccggtaaaggatgcaatacgccgtcgatacgcaagcggatgcggtaggcattgtccgctggttcgatatgaatatcagacgcgcgttgttccagcgcagattgtaacgttcgagttagcaactctgctttgggctgatgcttctcctgaacagctacgggcagtgtctgttgtgtgcgactggcgtgaccttccatttgttggcgcgtccagcaggtgatctcaatacgtttggtggtagcgaaatgcaatgcgtccagtagctcatggctaggtgcatcgactaccgcaacatgaaccacctcttcgctggcatccagcaagactccatgataacgcagacacagggcagtgagctgtggaatattcattgccgctccttagttggcgtcatcaaagcggaagacatcttcgcaggcttgctgcaatgcgctgtcactttgaatattgcagttgcgcgtccagccggtgacgccgtttgcgttatcccaacccggtgtcatgacgacgcttagcccattgagactttcttgcccggtcaggctcaccacgccctttgccacactcatggcactaacatagcgggtggtggtagggctgggaatgccattgctgccaccgtcgcaggtatctaatccaccatgttccagcgcgcacaactctacggcggtacggtaaggcacaaaggtttgtagcatgtcggtgagtgcggctttgcgcaggtagttttgataagcgggaataccaatggcgcttaaaatggcaatgatgccaataaccaccatcagttcgataagtgtaaaaccgcgttgcttgtccatctgtttcgctccttgatttggttggcgctactttggcaaacgccatcagcacaggcgaggggcaaaaaacgaaacgggaaagcagattccgaggttttttatttcgttgcagcgaaagacaagaaatttgcgaggcgttacgaagaaagttggggaaggggagattatccgcccgcgatggagcggataaatctgtcaactattagcgaaaacgcatactaaggtcgagtgcttgtacgtgtttagttagcgcaccgacggagataaagtccacgcccgtttcggcaaattcacgcagtgttttgtcagtgacgttgccagacacttccagtagcgccttgccgttggtgcgtttgacggcttcgcgcatctgttctgtttcgaagttatccagcatgatgatatcggctcctgctttcagggcttcatcaagttcttccagattctctacttcgacttctactggcgcatccgggtgcagccaggacgctttttcgaccgcctggcgcacactgccggaggcaataatatggttttctttgatcaggaaggcatcagaaagccccagacggtgattcgctccgccgccgcaaagtaccgcgtatttcagagcactacgcaggccgggtaaggttttgcgcgtatccaacaactgcgtgttggtgccttccagcaattcgacatagtggcgtaccttactggcaactccactaagggtttgcacaaaattaagcgcagtgcgttcgcccgttaacagcacgcgggatgggccttcaagttcgaacaaggattgattggcattgatgacatcgccgtcatccacatgccagattatggtgacatcgtcgcctgccagttgaataaacacctcttcaacccagcgtttgccgcaaaagacgccattctcgcgggtgatcaccgtggcatgagagcgagaattttccggtaaaagttttgccgtaatatcattgttggcatcgactgttccgcctaaatcttcccgcagcgcctgggccaccgcgccggggatatcgagattaatgcgttccagcagctcgtcacgtcgggtgtcagggttatagcggcgaggcggcatgttaaaactccagatagctaacgaatcataaggtagaaacatgctactctgaaccgggtattagcaccacatataaggagatcctgcatgttgttagaacaggggtggctggttggcgcgcgccgcgttcccagtccacattacgattgccgcccggatgacgaaacacccaccctgctggtggtgcacaatattagcctgccgccaggcgagtttggcggtccgtggatcgacgcattattcactggaactattgatccgcaggcacatcctttctttgctgagatcgcccatttgcgcgtctccgctcactgtttgattcgccgtgatggtgaaatagtccagtatgttcctttcgataaacgtgcatggcatgcgggagcctctcagtatcaggggcgcgaacgctgcaatgatttttctattgggattgagcttgaaggcaccgatacgctggcgtataccgatgcgcagtatcaacagcttgcggcggttacgcgggcactgattgattgctatccggatatcgctaaaaacatgacgggccattgtgatattgcgccggatcggaaaaccgatcccggtcctgcatttgattgggcacggtttcgtgtgctggtcagcaaggagacaacatgacgctatttacaaccttactggtgttaattttcgagcgcctgtttaagttgggcgagcactggcagcttgatcatcgtcttgaagcgttctttcggcgggtgaaacatttttctctcgggcgcacgttaggcatgaccattattgcgatgggcgtgacttttttactgttacgcgcattgcagggagtattgttcaacgttcccacgctactggtgtggctgctgattggtttgctgtgtattggcgcaggtaaagttcgtcttcattatcatgcttatctgacagctgctagtcgtaatgatagccatgcccgtgccacgatggctggcgaactcaccatgattcacggcgtcccggcaggctgcgacgaacgtgagtatttgcgtgagctgcaaaatgcattgctgtggattaactttcgtttttatcttgcaccgctgttctggctgattgtggggggaacctggggacccgttacgctgatggggtatgcgtttttgcgtgcatggcaatactggctggcgcgatatcagacgccgcatcatcgtttacagtccggcattgatgccgtgcttcatgtactggattgggtgccggttcgtcttgcgggtgtggtatatgccttgatcggtcatggtgagaaagcgttaccggcctggtttgctagcctgggtgatttccatactagccagtatcaggtgttaacgcgtctggcgcagttctctctggcgcgtgaaccgcatgtcgataaggtggagacgccgaaggcagcggttagtatggcgaagaaaaccagcttcgtggtcgtggtggtgattgcactactgacgatttacggggcgttggtgtaaagattattgccctcaccctgtacgggtgagggcgtagagagattaatgcgcttttacggctttggcggttttctctttaaacagatagccgatacctaacacgatcagccataccgggatcaggtatacgctaatcgccattcctggggtcatcagcataatcaccagtaccgccgccataaacagcaggcagatccagttacccagcggataaagcagagcagggaagcgagttaccacgccttgttcctgcttggcgcgacggaatttcatatgcgccaggctaatcatcgcccagttgattaccagtgcagataccaccagcgccattaacagtccgaaagcggactctggggcaaggtagttaatcagtacgcacaacgccgttaccagtgcagacaccagaatggtatttactggtacaccacgtttatcgacagacgccagcgcttttggcgcattaccctgttgtgccagaccaaacagcatacggctgttgcaatatacgcagctgttgtacacggagagcgccgcagtcagtaccacgatgttcagcgcattcgccacaaaggtatcgcctaactcgtggaagatcagcacaaacggactggtatcggcggtaacgcgggtccacggcatcagactgagcagaacggctaagctaccaatatagaaaatcaggatgcggtagataacctggttagttgctttcggtatactttgctccgggttatcagcttctgctgcggtgatccccaccagttccagaccaccgaagctgaacatgataatcgccatcatcatcaccagcccggtgaagccgtgcggcaggaaaccaccctgatcccacaggttgctaacggtcgcctgcgggccgccgttgccactgaatagcagccagccgccgaagatgatcatcgctaccaccgcgataactttgataatggcaaaccagaactccatctcgccaaacactttaacgttggtcaggttgatggcgttaatcaccacaaagaatacggcggcagaaacccaggtggggatttccggataccagaactgaatgtatttacccacggcagtcagctcagccatggcaactaaaacgtacagtacccagtagttccagccagaggcgaaaccggcaaaactgccccagtatttataagcaaagtggctaaaggagcctgcgacaggttcttcgaccaccatttcacccagctgacgcatgatcagaaaggcgataaaaccagcaatggcgtaacccaggataatccctggccctgcggactgtattacggaggcgctacccaggaataacccggtccctatcgcgccacccagcgcgataagctgaatatggcggtttttaaggccgcgctttagctgctcgccgtgctgttgaccttccatcatgaaacctcgtgcggtggttgtttttttgatctacgcagtgatgcgtgtgtaagtttgcaattccgtttgttgtattaatttgtttacatcaaagaagtttgaattgttacaaaaagacttccgtcagatcaagaataatggtatgcggcagcgaatgcacccgctttatgcatggttgaagatgagttgcttaaaaagaaaccgtttgtaaagctcagcctcaacccctctcaatatgtagaatgaatttaaattcgttttaattgaattaaaaatcacaaaattggtaagtgaatcggttcaattcggatttttatagtttaataatcgttaaaaaactcctttcctacgtaaagtctacatttgtgcatagttacaactttgaaacgttatatatgtcaagttgttaaaatgtgcacagtttcatgatttcaatcaaaacctgtatggacataaggtgaatactttgttactttagcgtcacagacatgaaattggtaagaccaattgacttcggcaagtggcttaagacaggaactcatggcctacagcaaaatccgccaaccaaaactctccgatgtgattgagcagcaactggagtttttgatcctcgaaggcactctccgcccgggcgaaaaactcccaccggaacgcgaactggcaaaacagtttgacgtctcccgtccctccttgcgtgaggcgattcaacgtctcgaagcgaagggcttgttgcttcgtcgccagggtggcggcacttttgtccagagcagcctatggcaaagcttcagcgatccgctggtggagctgctctccgaccatcctgagagtcagtatgacttgctcgaaacacgacacgccctggaaggtatcgccgcttattacgccgcgctgcgtagtaccgatgaagacaaggaacgcatccgtgaactccaccacgccatagagctggcgcagcagtctggcgatctggacgcggaaagtaacgccgtactccagtatcagattgccgtcaccgaagcggcccacaatgtggttctgcttcatctgctaaggtgtatggagccgatgttggcccagaatgtccgccagaacttcgaattgctctatagccgtcgcgagatgctgccgctggtgagtagtcaccgcacccgcatatttgaagcgattatggccggtaagccggaagaagcgcgcgaagcaagccatcgccatctggcctttatcgaagaaattttgctcgacagaagtcgtgaagagagccgccgtgagcgttctctgcgtcgtctggagcaacgaaagaattaatgatttttctggtaaaaattatccagaagatgttgtaaatcaagcgcatataaaagcgcggcaactaaacgtagaacctgtcttattgagctttccggcgagagttcaatgggacaggttccagaaaactcaacgttattagatagataaggaataacccatgagtgaacgtttcccaaatgacgtggatccgatcgaaactcgcgactggctccaggcgatcgaaagcgtcatccgtgaagaaggtgttgagcgtgctcagtatctgatcgaccaactgcttgctgaagcccgcaaaggcggtgtaaacgtagccgcaggcacaggtatcagcaactacatcaacaccatccccgttgaagaacaaccggagtatccgggtaatctggaactggaacgccgtattcgtagtgctatccgctggaacgccatcatgacggtgctgcgtgcgagcaaaaaagacctcgaactgggcggccatatggcgtccttccagtcttccgcaaccatttatgatgtgtgctttaaccacttcttccgtgcacgcaacgagcaggatggcggcgacctggtttacttccagggccacatctccccgggcgtgtacgctcgtgctttcctggaaggtcgtctgactcaggagcagctggataacttccgtcaggaagttcacggcaatggcctctcttcctatccgcacccgaaactgatgccggaattctggcagttcccgaccgtatctatgggtctgggtccgattggtgctatttaccaggctaaattcctgaaatatctggaacaccgtggcctgaaagatacctctaaacaaaccgtttacgcgttcctcggtgacggtgaaatggacgaaccggaatccaaaggtgcgatcaccatcgctacccgtgaaaaactggataacctggtcttcgttatcaactgtaacctgcagcgtcttgacggcccggtcaccggtaacggcaagatcatcaacgaactggaaggcatcttcgaaggtgctggctggaacgtgatcaaagtgatgtggggtagccgttgggatgaactgctgcgtaaggataccagcggtaaactgatccagctgatgaacgaaaccgttgacggcgactaccagaccttcaaaagcaaagatggtgcgtacgttcgtgaacacttcttcggtaaatatcctgaaaccgcagcactggttgcagactggactgacgagcagatctgggcactgaaccgtggtggtcacgatccgaagaaaatctacgctgcattcaagaaagcgcaggaaaccaaaggcaaagcgacagtaatccttgctcataccattaaaggttacggcatgggcgacgcggctgaaggtaaaaacatcgcgcaccaggttaagaaaatgaacatggacggtgtgcgtcatatccgcgaccgtttcaatgtgccggtgtctgatgcagatatcgaaaaactgccgtacatcaccttcccggaaggttctgaagagcatacctatctgcacgctcagcgtcagaaactgcacggttatctgccaagccgtcagccgaacttcaccgagaagcttgagctgccgagcctgcaagacttcggcgcgctgttggaagagcagagcaaagagatctctaccactatcgctttcgttcgtgctctgaacgtgatgctgaagaacaagagcatcaaagatcgtctggtaccgatcatcgccgacgaagcgcgtactttcggtatggaaggtctgttccgtcagattggtatttacagcccgaacggtcagcagtacaccccgcaggaccgcgagcaggttgcttactataaagaagacgagaaaggtcagattctgcaggaagggatcaacgagctgggcgcaggttgttcctggctggcagcggcgacctcttacagcaccaacaatctgccgatgatcccgttctacatctattacagcatgttcggcttccagcgtattggcgatctgtgctgggcggctggcgaccagcaagcgcgtggcttcctgatcggcggtacttccggtcgtaccaccctgaacggcgaaggtctgcagcacgaagatggtcacagccacattcagagcctgactatcccgaactgtatctcttacgacccggcttacgcttacgaagttgctgtcatcatgcatgacggtctggagcgtatgtacggtgaaaaacaagagaacgtttactactacatcactacgctgaacgaaaactaccacatgccggcaatgccggaaggtgctgaggaaggtatccgtaaaggtatctacaaactcgaaactattgaaggtagcaaaggtaaagttcagctgctcggctccggttctatcctgcgtcacgtccgtgaagcagctgagatcctggcgaaagattacggcgtaggttctgacgtttatagcgtgacctccttcaccgagctggcgcgtgatggtcaggattgtgaacgctggaacatgctgcacccgctggaaactccgcgcgttccgtatatcgctcaggtgatgaacgacgctccggcagtggcatctaccgactatatgaaactgttcgctgagcaggtccgtacttacgtaccggctgacgactaccgcgtactgggtactgatggcttcggtcgttccgacagccgtgagaacctgcgtcaccacttcgaagttgatgcttcttatgtcgtggttgcggcgctgggcgaactggctaaacgtggcgaaatcgataagaaagtggttgctgacgcaatcgccaaattcaacatcgatgcagataaagttaacccgcgtctggcgtaagaggtaaaagaataatggctatcgaaatcaaagtaccggacatcggggctgatgaagttgaaatcaccgagatcctggtcaaagtgggcgacaaagttgaagccgaacagagcctgatcaccgtagaaggcgacaaagcctctatggaagttccgtctccgcaggcgggtatcgttaaagagatcaaagtctctgttggcgataaaacccagaccggcgcactgattatgattttcgattccgccgacggtgcagcagacgctgcacctgctcaggcagaagagaagaaagaagcagctccggcagcagcaccagcggctgcggcggcaaaagacgttaacgttccggatatcggcagcgacgaagttgaagtgaccgaaatcctggtgaaagttggcgataaagttgaagctgaacagagcctgatcaccgtagaaggcgacaaggcttctatggaagttccggctccgtttgctggcaccgtgaaagagatcaaagtgaacgtgggtgacaaagtgtctaccggcagcctgattatggtcttcgaagtcgcgggtgaagcaggcgcggcagctccggccgctaaacaggaagcagctccggcagcggcccctgcaccagcggctggcgtgaaagaagttaacgttccggatatcggcggtgacgaagttgaagtgactgaagtgatggtgaaagtgggcgacaaagttgccgctgaacagagtctgatcaccgtagaaggcgacaaagcttctatggaagttccggcgccgtttgcaggcgtcgtgaaggaactgaaagtcaacgttggcgataaagtgaaaactggcagcctgattatgatcttcgaagttgaaggcgcagcgcctgcggcagctcctgcgaaacaggaagcggcagcgccggcaccggcagcaaaagctgaagccccggcagcagcaccagctgcgaaagcggaaggcaaatctgaatttgctgaaaacgacgcttatgttcacgcgactccgctgatccgccgtctggcacgcgagtttggtgttaaccttgcgaaagtgaagggcactggccgtaaaggtcgtatcctgcgcgaagacgttcaggcttacgtgaaagaagctatcaaacgtgcagaagcagctccggcagcgactggcggtggtatccctggcatgctgccgtggccgaaggtggacttcagcaagtttggtgaaatcgaagaagtggaactgggccgcatccagaaaatctctggtgcgaacctgagccgtaactgggtaatgatcccgcatgttactcacttcgacaaaaccgatatcaccgagttggaagcgttccgtaaacagcagaacgaagaagcggcgaaacgtaagctggatgtgaagatcaccccggttgtcttcatcatgaaagccgttgctgcagctcttgagcagatgcctcgcttcaatagtagcctgagcgaagacggtcagcgtctgaccctgaagaaatacatcaacatcggtgtggcggtggataccccgaacggtctggttgttccggtattcaaagacgtcaacaagaaaggcatcatcgagctgtctcgcgagctgatgactatttctaagaaagcgcgtgacggtaagctgactgcgggcgaaatgcagggcggttgcttcaccatctccagcatcggcggcctgggtactacccacttcgcgccgattgtgaacgcgccggaagtggctatcctcggcgtttccaagtccgcgatggagccggtgtggaatggtaaagagttcgtgccgcgtctgatgctgccgatttctctctccttcgaccaccgcgtgatcgacggtgctgatggtgcccgtttcattaccatcattaacaacacgctgtctgacattcgccgtctggtgatgtaagtaaaagagccggcccaacggccggcttttttctggtaatctcatgaatgtattgaggttattagcgaatagacaaatcggttgccgtttgttgtttaaaaattgttaacaattttgtaaaataccgacggatagaacgacccggtggtggttagggtattacttcacataccctatggatttctgggtgcagcaaggtagcaagcgccagaatccccaggagcttacataagtaagtgactggggtgagggcgtgaagctaacgccgctgcggcctgaaagacgacgggtatgaccgccggagataaatatatagaggtcatgatgagtactgaaatcaaaactcaggtcgtggtacttggggcaggccccgcaggttactccgctgccttccgttgcgctgatttaggtctggaaaccgtaatcgtagaacgttacaacacccttggcggtgtttgcctgaacgtcggctgtatcccttctaaagcactgctgcacgtagcaaaagttatcgaagaagccaaagcgctggctgaacacggtatcgtcttcggcgaaccgaaaaccgatatcgacaagattcgtacctggaaagagaaagtgatcaatcagctgaccggtggtctggctggtatggcgaaaggccgcaaagtcaaagtggtcaacggtctgggtaaattcaccggggctaacaccctggaagttgaaggtgagaacggcaaaaccgtgatcaacttcgacaacgcgatcattgcagcgggttctcgcccgatccaactgccgtttattccgcatgaagatccgcgtatctgggactccactgacgcgctggaactgaaagaagtaccagaacgcctgctggtaatgggtggcggtatcatcggtctggaaatgggcaccgtttaccacgcgctgggtagtcagattgacgtggttgaaatgttcgaccaggttatcccggcagctgacaaagacatcgttaaagtcttcaccaagcgtatcagcaagaaattcaacctgatgctggaaaccaaagttaccgccgttgaagcgaaagaagacggcatttatgtgacgatggaaggcaaaaaagcacccgctgaaccgcagcgttacgacgccgtgctggtagcgattggtcgtgtgccgaacggtaaaaacctcgacgcaggcaaagcaggcgtggaagttgacgaccgtggtttcatccgcgttgacaaacagctgcgtaccaacgtaccgcacatctttgctatcggcgatatcgtcggtcaaccgatgctggcacacaaaggtgttcacgaaggtcacgttgccgctgaagttatcgccggtaagaaacactacttcgatccgaaagttatcccgtccatcgcctataccgaaccagaagttgcatgggtgggtctgactgagaaagaagcgaaagagaaaggcatcagctatgaaaccgccaccttcccgtgggctgcttctggtcgtgctatcgcttccgactgcgcagacggtatgaccaagctgattttcgacaaagaatctcaccgtgtgatcggtggtgcgattgtcggtactaacggcggcgagctgctgggtgaaatcggcctggcaatcgaaatgggttgtgatgctgaagacatcgcactgaccatccacgcgcacccgactctgcacgagtctgtgggcctggcggcagaagtgttcgaaggtagcattaccgacctgccgaacccgaaagcgaagaagaagtaatttttcgtttgccggaacatccggcaattaaaaaagcggctaaccacgccgctttttttacgtctgcaatttacctttccagtcttcttgctccacgttcagagagacgttcgcatactgcactccgttgctcgttattcagcctgacagtatggttactgtcgtttagacgttgtgggcggctctcctgaactttctcccgaaaaacctgacgttgttcaggacttgcgctttgaacacgctggcgggcgttatcacgttgctgttgattcagtgggcgctgctgtactttttccttaaacacctggcgctgctctggacttgcggactgaatacgctcacgcgctgcgtctcttcgctgctggttctgcgggttagtctgcattttctcgcgaaccgcctggcgctgctcagggctggcggactgaatgcgctcacgcgctgcctctcttcgctgctggatcttcgggttagtctgcattctctcgcgaactgcctggcgctgctcagggctggcggactgataacgctgacgagcggcgtccttttgttgctgggtcagtggttggcgacggctgaagtcgtggaagtcgtcatagctcccatagtgttcagcttcattaaaccgctgtgccgctgcctgacgttgggtatctcgtgtaatgactggtgcggcgtgtgttcgttgctgaaactgatttgctgccgcctgacgctggctgtcgcgcgttggggcaggtaattgcgtggcgctcattccgccgttgacatcggtttgatgaaaccgctttgccatatcctgatcatgatagggcacaccattacggtagtttggattgtgccgccatgccatattcttatcagtaagatgctcaccggtgatacggttgaaattgttgacgtcgatattgatgttgtcgccgttgtgttgccagccattaccgtcacgatgaccgccatcgtggtgatgataatcatcattgtcatgatgatgatggtcatgatcgtcgtcgtcccagtcgatgctgctgaatagtgcgtacgtggtagcaacgcccatgctatagccgaatccgcgtacaaagctgtcaacaaacggttctccggctggtggtggcagataaaccggcggatacgcagtattggcccagttcccgtaaaccacggttgggttgtagttgggaatatagaccacatcaggattggcgggctcaatggaaatgacggttgttgccggctctgtaatgacggggttggcagttaaaactgtattggatggtatgacgggtgccgtgactgtctgttttaccggtacagctttcttcgttgtggtaataactttctgttcggtactactcttcaggctgccggtttgttgcgccagttgccgcaatcgctgtacgctgtccatcacgtcctgcggctgggccagaaaagcatcgcccaggttttgcacccattgcgggttttcgcccatcaatgccatcaattgtggaaaggccaccagacttttaacgctggcgtcccacggctggtcagataccgcctgaatagcagcatcgccttgtttaagtggattatcgtggctccattgcactgcttgagcaacgtttgtcggataggtacttgccatcagcacctggctaagtagggcgtcgggatacagcgcgacgggcgcgacccattgatctatttgtgcagtgctgaatgcggatttgacgacggcgggtgttacgggaggtgcggaaaccgttgcaggaaacgtaaccgcggcagcgtcagacacagccagttgtgtgctttgcggttccacaggcgcttccactgtgcggctttttatatatagcccggtagaggcggcacaaagcccggcactgcaaattagcgccagcacatggggtttaaacggcaaagtcattttcataattcggatctcaaggaaatcgcaatggtcggcgaactgccacccgcaggtgctgtgaatccgagtataaagaggcggtagtttaaattttgactaatcttgggattcgttgagaaaggtgattatcaccatgcgaattaacgaagtttttacggagggaaacaatctctagaccatccttaacgattcagccacttttttatgttgcttttttgtaaacagattaacacctcgtcaaaatcctgctattctgcccgttgcggtactgggcatttaccctacaaactgctgtctcacaggagcgtgaagagaatcgcctgccgcactatgacaatgagagcgaggagaaccgtcgtgctagaagaataccgtaagcacgtagctgagcgtgccgctgaggggattgcgcccaaacccctggatgcaaaccaaatggccgcacttgtagagctgctgaaaaacccgcccgcgggcgaagaagaattcctgttagatctgttaaccaaccgtgttcccccaggcgtcgatgaagccgcctatgtcaaagcaggcttcctggctgctatcgcgaaaggcgaagccaaatcccctctgctgactccggaaaaagccatcgaactgctgggcaccatgcagggtggttacaacattcatccgctgatcgacgcgctggatgatgccaaactggcacctattgctgccaaagcactttctcacacgctgctgatgttcgataacttctatgacgtagaagagaaagcgaaagcaggcaacgaatatgcgaagcaggttatgcagtcctgggcggatgccgaatggttcctgaatcgcccggcgctggctgaaaaactgaccgttactgtcttcaaagtcactggcgaaactaacaccgatgacctttctccggcaccggatgcgtggagtcgcccggatatcccactgcacgcgctggcgatgctgaaaaacgcccgtgaaggtattgagccagaccagcctggtgttgttggtccgatcaagcaaatcgaagctctgcaacagaaaggtttcccgctggcgtacgtcggtgacgttgtgggtacgggttctagccgtaaatccgccactaactccgttctgtggtttatgggcgatgatattccacatgtgccgaacaaacgcggcggtggtttgtgcctcggcggtaaaattgcacccatcttctttaacacgatggaagacgcgggtgcactgccaatcgaagtcgacgtctctaacctgaacatgggcgacgtgattgacgtttacccgtacaaaggtgaagtgcgtaaccacgaaaccggcgaactgctggcgaccttcgaactgaaaaccgacgtgctgattgatgaagtgcgtgctggtggccgtattccgctgattatcgggcgtggcctgaccaccaaagcgcgtgaagcacttggtctgccgcacagtgatgtgttccgtcaggcgaaagatgtcgctgagagcgatcgcggcttcagcctggcgcaaaaaatggtaggccgtgcctgtggcgtgaaaggcattcgtccgggcgcgtactgtgaaccgaaaatgacttctgtaggttcccaggacaccaccggcccgatgacccgtgatgaactgaaagacctggcgtgcctgggcttcagcgctgacctggtgatgcagtctttctgccacaccgcggcgtatccgaagccagttgacgtgaacacgcaccacacgctgccggacttcattatgaaccgtggcggtgtgagcctgcgtccgggtgacggcgtcattcactcctggctgaaccgtatgctgctgccggataccgtcggtaccggtggtgactcccatacccgtttcccgatcggtatctctttcccggcgggttctggtctggtggcgtttgctgccgcaactggcgtaatgccgcttgatatgccggaatccgttctggtgcgcttcaaaggcaaaatgcagccgggcatcaccctgcgcgatctggtacacgctattccgctgtatgcgatcaaacaaggtctgctgaccgttgagaagaaaggcaagaaaaacatcttctctggccgcatcctggaaattgaaggtctgccggatctgaaagttgagcaggcctttgagctaaccgatgcgtccgccgagcgttctgccgctggttgtaccatcaagctgaacaaagaaccgatcatcgaatacctgaactctaacatcgtcctgctgaagtggatgatcgcggaaggttacggcgatcgtcgtaccctggaacgtcgtattcagggcatggaaaaatggctggcgaatcctgagctgctggaagccgatgcagatgcggaatacgcggcagtgatcgacatcgatctggcggatattaaagagccaatcctgtgtgctccgaacgacccggatgacgcgcgtccgctgtctgcggtacagggtgagaagatcgacgaagtgtttatcggttcctgcatgaccaacatcggtcacttccgtgctgcgggtaaactgctggatgcgcataaaggtcagttgccgacccgcctgtgggtggcaccgccaacccgtatggacgccgcacagttgaccgaagaaggctactacagcgtcttcggtaagagtggtgcgcgtatcgagatccctggctgttccctgtgtatgggtaaccaggcgcgtgtggcggacggtgcaacggtggtttccacctctacccgtaacttcccgaaccgtctgggtactggcgcgaatgtcttcctggcttctgcggaactggcggctgttgcggcgctgattggcaaactgccgacgccggaagagtaccagacctacgtggcgcaggtagataaaacagccgttgatacttaccgttatctgaacttcaaccagctttctcagtacaccgagaaagccgatggggtgattttccagactgcggtttaaaaagtcagcgcacgcgctgcgcataaacgacacaatgcccggtgaatgagattcccgggcatttttttatttctaaaccatcgccgttccgctgtttttctccggtaaggctgcgataattacatcaatggcgcaatgcgatttcggtgcattgccgggagcagaggaacacactatggattacgaatttctgcgcgatattaccggagtggtaaaggtgcgtatgtccatggggcatgaagtggtcgggcactggtttaatgaagaggtgaaagaaaacctggccttgcttgatgaagtggaacaagcagcgcacgcactgaaaggtagcgaacggtcctggcaacgggcagggcatgaatacaccctgtggatggacggtgaagaggtgatggttcgcgccaatcaactggaattcgctggcgatgaaatggaagaggggatgaactactacgacgaagaaagcctgagcctatgcggcgttgaggattttctgcaggtcgtggcggcttaccgcaatttcgtgcagcagaagtaaataaatctggcggagcctgggagctccgccagagccgttaaacagctggcatattgcgcccgtaataaatctcgcgcatttctttccacagcgcagcggtaatttcctggcgctcgctgtcggttaagtcttccggtttggtgtggaacatgtagtgcttaaggtcgaactctttaagcaacatcttggtatggaagatattttcctgatagacgttcacatccaccatgtcatacagcgccttcatatcgtcagacataaagttctgaatgctattaatctcatggtcgataaagtgcttcataccgttaatgtcgcgggtaaaaccgcgcacgcgataatcaatggttacgatatcggactcaagctggtggatcaggtaattcagcgccttcagcggagaaatcacgccgcaggtagagacttcaatatcggcgcggaaggtacataaaccgccttcaggatgactttccgggtaggtatgtacgcaaatatgacttttatcaagatgggcaacgaccgtttctggcagtgggccggggtgttctgttttgtcgatgagtttcgggtcaaccggttcttcactcaccagaatagtgacgctggcaccctgtggttcgtaatcctggcgggcgatgttaagaatattagccccgataatggaacaggtttcactcaggatttcggtcagacggttggcattatagagttcatcgatataagcaatataaccgtcgcgctcttcggcagttttggcgtagcagatatcgtaaatacaaaaactcagacttttggtcagattattaaagccatgcagtttcagttttttcaatttcttatcttctccttaggacggctgactagccagtgcgtcttgcagatactgaggtaaggcaaaagctgccgtatggattgccggattgtaataacggcatttcaggccagaggcgagaaaacgcgcctgaataatttcggtactgagatggcgtaaggcgtcgttatctgtcgcccatgcaaaagtcatgataccgccgtaataggtcgggatcgccgcctgataaaagccaacgtcgctgaagtaatggctgagtttgcgatggctgtcgatggcttcttcctgctgtaaaaagcagacgccgttttgtgcgacgaagataccgccaggattcaggcaacgtttgcagccttcataaaatgcgctagtgaaaaggctttcgccgggaccgataggatcggtgcagtcggagataatgacatcaaaggtctggctggtttgattaacgaaattgacgccatcgtcgatcaccagcttaaagcgcggatcgtcgtagctaccggcgttatggttgggtagatactgacggcagaagcttacgacacccgcatcgatttccaccatcgtgatactctcaacgtttttatgtcgggttacttcacgcagcatggcaccgtcgccgccgccgataatcagcacatgtttcgcgtgaccatgggccagtagcggaacatgggtcatcatctcatgatagataaactcgtcgcgctcggtggtttgtactacgccatccagcgccattacgcgaccaaatgcagcgttctcaaaaatgatcagatcctggtgatcggtcttttcatgatacagaacgttatctaccgcaaagtactgcccaaactggtcgtgtagcgtttcatgccactgttttttttcggccatgggttgatacctcctttgttaacacccgtaaaaaaagggcgcaacataatagctaacattgaccgcggatgcacggtcaatatttctacaaaaaggtatcagggattatttgacgtaggcaagcaggcttaaggaatcgcgggccagggctttgcattttttagcgacgggaatgccaatgccgctgagatcgcggtagctgtcttcaccgagggctttcatgtcgaaggtgtcgtaattactgaggtcccactggttttgctgagcgaaaaagaccagtgcgcgacgaatttgcccgttaggtaagttctggtaaccacaatcgttcttcagaaagacaaaaactgccgttaaatcggccatatcttcggcttcagactcgctgagcgcgtaactgtttgcgcagacggccatcaggctgccgaataacactgttctgaaaaacgtcttcattgcttctaccaggggcttaaagaagataaacgttagcacactgcgagcgaggcgacgaccattattgtcgattaaattgtgtctgcggcttgaccttcccgtaaggggaaggactatgctcaacgtttgattttgtttcgcctgcttaagaataaggaaataactatgcaacgtcgtgatttcttaaaatattccgtcgcgctgggtgtggctagcgctttgccgctgtggagccgcgcagtatttgcggcagaacgcccaacgttaccgatccctgatttgctcacgaccgatgcccgtaatcgcattcagttaactattggcgcaggccagtccacctttggcgggaaaactgcaactacctggggctataacggcaatctgctggggccggcggtgaaattacagcgcggcaaagcggtaacggttgatatctacaaccaactgacggaagagacaacgttgcactggcacgggctggaagtaccgggtgaagtcgacggcggcccgcagggaattattccgccaggtggcaagcgcagcgtgacgttgaccgttgatcaacctgccgctacctgctggttccatccgcatcagcacggcaaaaccgggcgacaggtggcgatggggctggctgggctggtggtgattgaagatgacgagatcctgaaattaatgctgccaaaacagtggggtatcgatgatgttccggtgatcgttcaggataagaaatttagcgccgacgggcagattgattatcaactggatgtgatgaccgccgccgtgggctggtttggcgatacgttgctgaccaacggtgcaatctacccgcaacacgctgccccgcgtggttggctgcgcctgcgtttgctcaatggctgtaatgcccgtagcctcaatttcgccaccagcgacaatcgcccgctgtatgtgattgccagcgacggtggtctgctacctgaaccagtgaaggtgagcgaactgccggtgctgatgggcgagcgttttgaagtgctggtggaggttaacgataacaaatcctttgacctggtgacgctgccggtcagccagatggggatggcgattgcgccgtttgataagcctcatccggtaatgcggattcagccgattgctattagtgcctccggtgctttgccagacacattaagtagcctgcctgcgttacctagcctggaagggctgacggtacgcaagctgcaactctctatggacccgatgctcgatatgatggggatgcagatgctaatggagaaatatggcgatcaggcgatggccgggatggatcacagccagatgatgggccatatggggcacggcaatatgaatcatatgaaccacggcgggaagttcgatttccaccatgccaacaaaatcaacggtcaggcgtttgatatgaacaagccgatgtttgcggcggcgaaagggcaatacgaacgttgggttatctctggcgtgggcgacatgatgctgcatccgttccatatccacggcacgcagttccgtatcttgagtgaaaatggcaaaccgccagcggctcatcgcgcgggctggaaagataccgttaaggtagaaggtaatgtcagcgaagtgctggtgaagtttaatcacgatgcaccgaaagaacatgcttatatggcgcactgccatctgctggagcatgaagatacggggatgatgttagggtttacggtataaaaagaccgtattcggaaatatgcccggatctctccgggcattaaactgatgacaaacgcaaatctgcctgatgcgctacgcttatcaggcctacgctagctgtgcaatccattgattttgcacaattttgtaggctggataaggcgttcacgccgcatccggcatgaacaacgcgcacgttgtcagcaatctgagcaagtcttacttcacatcatccggcagcgcataagccacaatatagtcgcccatcttcgtaccaaaactaccgtgaccgcctgcggagatcaccacatactgcttaccattcacttcataggtcattggcgtagcctgaccacccgctggtaaacgaccctgccacagtttttcaccgttgctcatgttgtaagcgcgcaggtagttatctgccgtagcggcgataaacagcacgttacccgccgtggagattggcccgcccagcatcggcatacccatattgaacggcaccggaaccggcatcgggaacggcatactgtcctgcggcgtaccaatacgtttcttccacaccacttcattagttttcagatccagcgcgctgatataaccccatgctggctgtttacatggcagaccaaatggactgaggaacgggttgagcgtgacaccatacggtacaccgtactgtggctgaatgccggattccgtacccgtgcctttggcatctttcggctgctccatcgggttgccaggaccacgcgggatcagtttgctaacaaacggcagtgccattgggttggcaatcgccacttcacgatttggatcaacggaaatcccgccccattcgaacatccccaggttacccgggaagaccagcgtaccctgttcagatggcggggtgaaaatgccttcatagcgcatctggtggaacatcacgcggcacaccagttggtcaaacatggtggctccccacatatccgcaccgctcaaatctttcgtcggacggaagctcagttcagaaaacggttgagttggggttacgtaatcgcctttcgctgcaccttggggaaccggtttttccggtgccggaaccaccagttcgccattacgacgatcgagcacaaaaatgttgccggttttcgccggagcgtaaataactggcactttctgaccattaacggtgatgtccgccagcgtcggctgtgccggaagatccatgtcccacaggtcgtggtgaacggtctggtagctccacgccagtttcccggtagtggcattcagcgccagaatgctgctggcataacgttcctgttccggtgtgcggttaccgccccagatatccggcgtggtcacgcccatcggcagatagaccagatccagcttcgcgtcataggccgctggtgcccaggagtttgggctgttaaaggtaaaggtgtgttcgtcagacgggattgcgttcggatctttcgcgccgggatcaaaagcccacagcagctccccggtgttgacatcaaaaccacggatcacgccagacgtttcgcgggtactgaagttatcggtaacactaccggccatcacgatggttttatcggtgataatcggtgggctagtcggttcatacagacccggtttggtgtctggcatattgctttgcagattgagcacgcctttattggcgaaggtttcgcacagtttgccgttttcagcgttaatcgcaatcagtcgaccatcattgaccggaagaatgatacgacgcgggcaatccgccatcacttccgggctagcggtttctgctttggcttcatgataagagacaccacggcaggttacgtgctggaaagactcgttggttttcagctcaggatcgtaatgccatttctctttgccgctggcggcatcaagcgcaaacaggcgctggtgagcggtacacaggtaaagggtgtcgcccactttaatcggcgtcacttcattggtgatttcacccggatcgttcggctgcttcacatcgccagtacggaacacccaggcttctttcagattatggacgttatcggcgttaatttgtttcagcgggctaaagcgttgaccttcctgattacgaccataggcaggccagtcctgatcggctacgggggagatagcttcagcaggtgtggcatcggcgcttaaggtgccgttgatctcctgcggatcgttaaatccggcccaggtcaggataccaccgctaatcagcagtgcgaccaccagtgcggcaactgcgccgctggcaggaatgaccaggcgacgccagacaaacggcaggatcagccagatgccgaagaagaccagaatgtcgctgcgcggagtcagcgcccagaagtcgaaaccaacttcccagacgccccaaatcatggtgccgagcagcagggctgcgtatagccaaagcgcggcgcgtttactgcgccacagcatccaggcgacgccgagcatcacaaggccagcgatagggtagtaccaggagccgccaatcgcgaccagccagcctccgccaatgagtagatacagcccgcaaagcgctgcaaaaagggctgttagcgtgacgagtaatcgtcggctgcctgtattgttaattgccataaagagacaccatttcaattcattaatattttagtagcaattaattataggttttaacatgtgtgatcgtcatcacaattcgagctttattaacagattccgcgaatgaatagttttactggtatactgcgtgtcttgcgctttgttgcggtgccaaaacctgcccgtgcgaagtgatttgtttttaaatcatatggttagagatatgaaacatactgtagaagtaatgatccccgaagcggagattaaagcgcgtatcgccgaactgggtcgtcagattactgagcgttacaaagacagcggcagcgatatggtgctggtgggtctgctgcgtggcagttttatgtttatggcggacctgtgccgtgaagttcaggtatctcatgaagtcgactttatgaccgcctccagctacggtagcggcatgtccaccacccgtgatgtgaaaatcctcaaagatctggatgaagatatccgtggcaaggacgtgctgattgttgaagatatcatcgacagcgggaatacactgagcaaagtgcgtgagatcttaagcctgcgcgaaccgaagagcctggcgatttgtacgctgctggataaaccgtcccgtcgtgaagtgaacgtcccggtagaatttatcggtttcagcatcccggatgagtttgtggtgggttacggcattgattacgcacagcgttaccgtcatctgccgtatatcggcaaagtgattctgctggacgagtaagtgtgaagttgccggatgtgttgcatccggcatggcatttttatttgtggttggcgtgtttcagcttgaggttggaaatcccgtgacggtaacgttgctcaagggtttcgcggttggtggcggtaacatccagatcacgcagcaagccgtcgtgaatgccgtaggcccagccgtgaatggtaactttctgcccgcgtttccacgcactttgcataatggtggagtggcccaggttatacacctgttccatgacgttcagttcacacaaggtatccagacggcgctcttgcggcatttcgccgagcaaactgctatgtttgaaccagatatcgcggatatgcagcagccagttgttgataagccccagttccgggttttcaactgcggcttgtacgccgccgcaaccgtagtggccacagataataatgtgttcaacttcgagtacatccactgcatactgaaccacggaaaggcagttcaggtcagtgtgaatgaccaggttagcaacattacggtgaacaaagagttcgcccggttcaagaccggttaaacgttctgcaggaacgcgactgtcggaacatccaatccatagaaagcgcggtttttgcgcttgtgccagtttctcaaaaaacccgggatcctcttccaccagcattttactccatagtgcattgttgctgatgagtgtatctatgtctttcatggaggttaacgacctgtaaccaaataattacgtttggctaatatagggcaactccgggacgatttaaaccacagataaagtgtaagaacgtaaggtaagtaaaaatttatgaccattgcactggaacttcaacagcttaaaaaaacctatccaggcggcgttcaggcgcttcgtgggatagatttgcaggtcgaagcgggtgatttttatgcgcttctcgggccgaacggggccgggaaaagcaccactatcggtattatcagctctctggtaaataaaacctccgggcgggtcagcgtatttggttacgatctcgagaaggatgtcgtgaacgctaaacgtcagttgggactggtgccgcaggaatttaacttcaacccgtttgaaaccgtgcagcaaattgtggtgaatcaggcagggtactacggcgtggagcgcaaagaagcgtacatccgcagcgaaaagtatcttaaacaactcgatctatggggaaaacgcaacgaacgtgcgcgtatgttatctggcgggatgaagcgccgtttaatgattgcccgtgcgttaatgcatgaacctaaactactgattctcgacgaaccgaccgcaggcgtggatattgaacttcgccgcagtatgtggggctttttgaaggatttaaacgacaaaggcaccaccatcattctcaccacacactacctggaagaagcagaaatgctgtgccgcaatatcggcattattcaacacggtgagctggtggaaaataccagcatgaaggcgctgctggcgaagctgaaaagcgaaacctttattctcgatctcgcaccgaaaagcccgttaccgaagctcgatggctatcagtatcgactggtcgataccgcgacgctggaagttgaagtgctgcgtgagcaggggatcaacagcgtatttacgcagttaagtgagcagggcattcaggtattaagtatgcgtaacaaagctaaccgtctggaagagctgtttgttagtctggttaatgaaaaacaaggagatcgcgcatgatgcatctttactgggtggcgctaaaaagcatctgggcgaaagagatccatcgctttatgcgtatctgggtgcagacgctggtgccgccagtcatcaccatgaccctttactttattatcttcggtaacctgattggtagccgtattggcgatatgcatggcttcagctatatgcagttcatcgtaccggggctgatcatgatgagcgtgatcaccaatgcctacgccaacgttgcgagtagtttttttggtgccaagttccagcgtaatattgaagagctgctggtagcgccggttccgactcacgtcattattgccggatatgtcggcggtggcgtggcgcgtggtctgtttgttggcattctggtgacggcaattagtctgttttttgtgccatttcaggtgcatagctgggtattcgttgccttaacgctggtgctcacggcggtgttgttctcccttgcgggtttgctgaacggtgtgtttgccaaaacgttcgatgacatcagcctggtgccaacctttgtgttaacgccactcacgtatttgggcggggtcttttacagtctgactttgttgccgccgttctggcaagggctgagccacctgaacccaatcgtttatatgatcagtggtttccgctacggcttcctcggtatcaatgatgttccgctggtcactacctttggcgtactggtggtctttattgtggcgttttatttgatctgttggagcctgatccaacgtggacgtggtttgcgtagctaaggctatttcctctcctctggatttgggggagaggagttttgacggctatcaccctttatcaacaatggtcagggtagactgattttcggctaaggaggaaggcgatgttaggttgggtaattacctgtcacgatgaccgggcgcaagagatactggatgcgctggagaaaaaacatggggcacttcttcagtgccgggccgtgaatttctggcgcggattaagctctaatatgctcagccgcatgatgtgcgatgctctgcatgaagcggactctggtgagggtgtcatcttcttaaccgatatagccggagcgccaccgtatcgcgtggctagtttattaagccacaaacactcccgttgcgaagtgatttctggtgtcacgttaccgttaattgaacagatgatggcttgccgtgaaaccatgaccagtagtgagtttcgcgagcgtattgtcgaactgggtgcgccggaggtgagtagtctttggcaccaacaacaaaaaaatccgcctttcgtcctcaaacataatttgtatgagtattaacccgcgattctgatggcgcttttgctacaataaaagcgttgtttcaccctcggttattttttcatgtacaaacaagctgttattctcctgctgatgctgtttaccgcaagtgtcagtgccgcgttacctgcccgttatatgcaaaccatcgaaaatgctgcggtctgggcgcaaattggtgacaagatggtgaccgtggggaatattcgggccggacaaatcattgccgtggagcccactgccgcaagttattacgcatttaattttggctttggcaaaggttttatcgataaaggtcatctcgagccggttcaggggcgacaaaaagttgaagacggtttgggcgacctcaacaagccgctgagtaatcagaacttagttacctggaaagatacgccggtctataacgcgccgagtgcgggaagtgcgccatttggggtactggcggacaatttgcgctacccgattttgcataaactgaaagacaggttaaatcaaacctggtatcagatccgtattggcgatcgactggcctatatcagcgcactggatgcccaacccgataatggcctgagcgtgctaacctatcaccatattctgcgcgacgaagaaaacacccgttttcgccatactagcacgaccacaagcgtacgcgctttcaataaccagatggcctggctgcgtgacaggggatacgcgacactgagcatggtgcagctggaaggctacgtgaagaataagatcaatctccctgcgcgagcggtggtgattacctttgatgatggcctcaagagcgtgagccgctatgcgtatcctgtgttgaaacaatatggcatgaaggcgacggcgtttattgttaccagtcgcatcaaacgtcacccgcagaagtggaacccaaaaagcctgcaatttatgagcgtttctgagcttaacgaaattcgcgatgtatttgatttccagagtcatacccattttttgcatcgggtagatggttatcgccgacccatattactgagccgtagtgagcacaatattctgtttgattttgcacgtagtcgccgcgctctggcgcaatttaatccgcatgtctggtatcttagctatccgtttggcggatttaatgacaacgccgtgaaggcagcaaacgatgccggatttcacctggcggtgacaaccatgaaaggcaaagtaaaaccgggggataatccgttgttactaaaacgactttatatcttaagaacggatagcctggagacgatgagccggctggtgagtaaccagccgcagggataacaatcaagcaacctgtaccggaatcgctttcgcggtacgtttcatttcattgtcgccttcaaaataggcgacgttgggtcgccaggtgcgagcttcttcatctggcatggtaacgaagctggcgatgatgacaatatcgccgacactggcgcagtgggccgccgcaccgttaacagaaataattctgctaccgcgttctgccgcgatggcataagtggagaaacgcttgccgttggtgacattccagatatcaatggcttcgttttcgagaataccggctgcgtcaagaaaatcctggtcaatggcgcaagaaccttcatagtgcaggtccgcatgagtcactttcacgcggtggagtttgccctgcagcatcgtgcgaatcataacttctacctttctaccctgtcgttaacgaagcaggcgatgcctgctttgaggaaattctcacgcagtattgcccgatttttgtttagtgtctactcatctgacggcatttgcgtcagcagtttgcgtaccgcgccgaagcgtgccatgtatcgcctgtaacgaattgatatttctctgaacgctgctcggtaaacaataaagaggtggctgacgatagcgcgccttgactggatactgccttcacgcaaagccacacggaagacagggaagatggatgcaccgagtaccacaccgcatgacgcggtatttaaacaatttttaatgcatgcggagacggctcgcgactttctggagatacatttgccagtggaattacgcgaactttgtgacctcaacacgcttcatttagagagcgggagtttcattgaagagagcctgaaaggacacagcacggacgtgctctattccgtgcaaatgcagggcaatcccggttatctgcatgttgtgattgaacaccaaagcaagccggataagaaaatggcctttcgcatgatgcgttattctatagccgccatgcaccggcatctggaggctgaccacgataagctgccgctggtggtgccgatactgttttatcagggcgaggccacaccttatccgctaagtatgtgctggtttgatatgttttacagcccggagctggcgcgacgcgtctataacagtcctttcccgctggtggatatcaccatcacaccggatgacgaaatcatgcaacatcggcggattgcgattctcgaactactgcaaaaacatattcgccagcgcgacttaatgttattgcttgagcaactggtcacgctgatcgacgaagggtacactagcggaagtcagttagttgccatgcaaaactatatgctgcaacgcggtcatactgaacaagcggatttgttttacggtgtgttgagagacagggaaacgggaggggagtctatgatgacgctggcgcagtggtttgaagagaaagggattgagaaggggattcagcagggaagacaggaagtaagtcaggaattcgcccagcgtcttctgagtaaaggaatgtctcgggaagacgttgcagagatggcaaatttacctcttgctgagattgataaggtaattaaccttatttaagttacctgtgttatgacagatgacgtggggtaaattaataactggcgccatcagccgtagcgccagttaagtattacgccagctcgaccattttgttgtcgatcaggcgagcatcgccaagccaggcggctaccagaattactgcccgtttgctggtttcagaaacttccagcaatgtgtcggcatcgcgaatctgaatatcatcggcgcggaagcctttttcattcagttcttgccccgcaatggtaataatttcatcgagatcccgttccccagcctgcaatttgtcagcaatgctacttaaaactttgtacagaccaggcgcaattttgcgttgttccgccgtcagataaccgttacgggaacttagcgccagaccgtctttggcgcgcataattggcacaccgacaatctcaatatcgaagcccatatcggcaaccattttgcggatcagcgccagttgctgaaaatctttttcaccgaagcaggcgatgtccggctggaccaggttgaacagcttgctgacaatagtgctaacgccgcgaaaatgtcccggacggctggcaccttccagcatggtgctaaggccaggaacgtcaacgtaagtgtgggtttcagtaccgttcgggtagatctcttttacgctaggggcgaaaactaaatccactttacgtttgtttagcttctcgcagtcctcctgcaaggtccgtggataacgagccagatcttccgggcggtcgaactgcatcgggttaacgaaaatactgacgacgaccacatcggcgcgggctttggcttcgtcgaccagcttcatatggccatcgtgcaggttacccatggtaggcaccagcgccacgcgcttgccttccatacgcaggcggcgaatttgctgacgcagcagcggcagggtttcgataattaacacaacgtgactccttaatggaaactgtgttcttcgcccggataaacgccggactccacttcagccatatactgccgcacagccgcgcggatgtcgcccgtttcggcgaggaaatttttagcgaatttaggaatgtgaccgccggtaataccaaaggcgtcgtgcatcacgaggatctgcccgtcagtgacgttgcctgcgccaatgccaataaccgggatcgccagtgcttcggtaatacgttttgccagttcaaccggcacgcattccagcaccagcagctgtgccccagcagcttctaaggctaatgcatcgctgagcagttgatcgcccgcttcatcgccgcgcccctgaactttgtagccaccgaaaatattcacactctgtggtgttaaacctaagtgaccacatacaggaacggcacgttcggtcagcatttgtacggtttctaccagccactcaccgccttcaattttgaccatgttagcaccggcacgcataaccgttgcggcgttttcgaaggcttgttccggcgtggcatacgccataaacggcaggtcagccagcagcaggcagtttggtgcgccgcgacgtacggcggcagtgtggtaggcgatatcggcaacggtaactggcagggtggagtcgtgcccctgaaccgtcatgcccaggctatcgcccaccagcatgacgttaagcccttcatcagcaaagagtttggcgaagctatagtcataagcggtgatggtcgcgaaacgttttttttcctgtttgtacttctgcagtaaggagatggtggtcggtttcataacgtatcctgataaattgatgttgtgctgtctggcattttatcagtcacattggtgggggcaatgatttatccgtagcagcactgccagaaggtgacagtgctgctacgttatcagggataggttacctggaaagtactggtggctttaaattcgccgggttcgatagcaatattcccgtcttgctttaatgttgcctggaaatgaagaggctgacttgtgccgttaccttgattagggtaaaccccatcggaggtgtcatcttcggtttcataatctatataaacagaattcgtatcattaggttttaatgtcattagcggatttttactggttgctaaaccttcaatgagtacgccaacgcctttggcggcagtgcttccagtaagcgtattaccaagcagttgtgtgttttgagtacctacttttccagtgacgagttttgtttcaatattacgcacacgaatacaattctgaaggctgatatcaaagggaacaggactagcgccatttttaattgtcccagagctatattctcccattctaaccgtactaccattgacacttggcccggtaagtatggaggtaaaacatgttggtaaggttaatttgacattattcagtgtgaaattgacataaatgtggttgctgtgatctacaacttttgtaccaggactgtaggccttaaagctataaaggtaattactactactggataactggacttgctgattaagtgtaggatcgaaattagtatctgtataaaattcaacagttatgttgtgtactataccaccaatagcccaaaacttatcgtagtcgtctgctttgttgcaacccttagtttgtagatcgctgtctgtgacggaaaagaaaaattcttggttggaaggatctccgatatagattcctgggctttgaatgtcagttattgtatcgtatgcagaccagaccctacttattaacatggtgtaatacagaccaggaacagatgtattaaatagtttatgtccgccataatctttaccactatagaccatggcattttcaatagttattggaccaggattcgctctgccagatgtattgcagtaaagaataccaccaccggtacctgtatccaggtaactccagtacatttttaccccagtcgggccgagctgcgtgggtttataaaaaaccaagttgcttgctgtacttgtgtaattaaaggtcatctgtgcggcagtggaggggcctcgatagttatcaactcctgcattatttcccacaataaaacttgtatatgcactgactgtattacaacaagaatacagtgctaaaaaaagaatgtacctgaagatagtcttcatttttactccaatgtttctttattgttatggtttgcgctgtttttgtttgttattcgtagtaaatatccactaacacatggctcataagttgaccagatgtaacactcaatgcaggatcgattttttgcattcgggtgctaaatttccaggaactaccattcatgtcatcgctcattactggataaacggaacgagatccgccactagcattaagaacattgaatgtattcgcgctatcctgagtagaaaatataactactcctacattacttgctccactgctaatttcattagcaaatatttgcctagagccagcagccatgacaccgctaagggctctaaaatcaatatgtaactgatttagcacatcgccagttccctgtaatgcacagtcggatacagtgatagtgaactcttttccacctggttgataactttcaggagtaacattaccactaaaatatcccaccccaacgacgccaagatcaatattaccctggttactgattccgcttttgcaggtgctgttttttacattggcaacaaggtcaatatcctgtccagcaatggctggacaggcgatgcaaaacagtaaactcagaaacagaattattctcttcatcagcttacgttgagtgggatgcatatatagttcctgaatctgtaagtctgttagttataggttactgtaaatgtggctggtgcagaaaacttacccgcagtgacattgtttacggttttatttttttccacgaccaggcgtgcactcatcggataataaacgaccgcattggctgcagtggagattgttacctcttgacttgctggtgttacacagctaaattgtgttgcactccctgttgccggagttacagtgctccagacttcaacggcgacagcacttgctttatctgcggctgtggaaccatttgcaaaccccgcaccgtcattagcagttccctcgcatgtggctcgcttggttaattttatttgcgcttttttattggggatacccgcacagtctttgaatttgagtttgaatgtttttactttggtcttggcattgatttcagaaatatatacatcaccaaaatcaacaacagaaatgtcctgatcagagtcatttactaatgtagcggtacaagtacccatttctacagtagtaataacggtcagtccaatactgtctgttgccgcataagagagtacgctgaacaaactggcagccaaaacgacactgctggataatccataacgtaaatttttaaatgtcatcataattatccttcttattgatagatgaaattaaacgtcgccagtgcacgaaaattccccggtacgccttgccctgcatctgtttcacgtagcgcaacggtcatttcaagacccttatcgggctgcatctcgtctgtgctccagcgtatcttttccgcactgttaggtttaaggaaagtggcatcatcagtagtccgttttttgaaacccataccgatattacttgtcgtgctagaactatcaccagactgcggtataataagcttaggactgctactacttgcatttccggtcagagtggtatcaatccaactgatgccactgctgcacccactggcaaccagtttaaaatcagcctgagattctgtcgttttattcgcgatcttatccagacccatcttagggattctcaatgtgtagttattattgccatcattcgtgacgttattaccagtaagtgtgatgttacaggttgtcgctttgacagtggctgtaaactctacattaatatccgttgcaaatacactgggacttaataatattcccatcagtatcactattttatgtggcgttgtttttatcatttgacgtcccttgtagttactgaatctgacaccgaattccattcagaataatagattgtgctattttttctgcttctgggctttgttgataatgcgcaagacaacttacgggtttactttgttcgagccatttaatgctgatatttccctgctgctcaataccacgaacaaatgcttgtccaccctgtccaacattaccaatgacattgccttgctcatcataaatatctgcagcaaatggaatatttttaccatcacttcgtgtgatgttcataatggcactttgcccttgcacggtttcaaaatcagcaaagacgacactaccctgacgcggtacagctactgcactggtactttttaattcaacatcgttctcaagatcgttgatatccagcgcgatacggttttcatgataaggagaaagagcgctggtgacaccataaccccatcgatcgatagtactgttgccataatttattcgcgctccttgagcacctggagcctgaactaccgccagtgtatcggagtcgctaaaactatcattactgaaagtcagtccaccgctatgcaatacaaaaccaccgtcggtgctgagagaaacttgacggctgttatcgctatttgcagaaatactacctgccagcgttccccatggactctcatagctggcataacccccaacataactcaaatctttgctggctttattcatcgtatagccagtattcacgctataactgacgcgagcgttatcgctatagccactgctgctaacgttgagttggttattacccttaaagtcactgcttatttgagtatcaatactctggaaaccactagtacgttgttcagtgccaagtaatttttcaattggaatggtgaaactaagataaacgctatcgtcagtgtcgccgtcttcattccaactacgctgggcactgacactgtagctgccccaggatgtactgttactgtagccaatagagtaattgctacgattttgtccggaagcccagtaatcggaccaacttccggaaagataaaaactaccgtaatcttttttctcaaatttcaacggttggttaatactgaccgtaacctgatttttcatgcgactgtaattacgcatggatttcggttcaagatcttgttcgggatgtttcacttcatcaattagagttagtgcatcattaagaccaaggtaattctgtgtgctatagcgataggccgcgatattcagactagtacttgtttcttcgaataacttgttccaggaaacacgataactttgcccctggtatgttttatcatccgggatacgaacattggaatgagtcacatcgaaagaaaatgcaccaacactagtattcagaccaagacctaacaaaccagcggtatagttattatcggttatctgaataccggtataacccgtcagatagttattcaggccgtagtagtagcttgcttgaaataaattaggctcatcctgaatatcatcttttaagacctgaccgccgctaatatcccaacgtccaacgccagggcgtaacatttgaacaacggaactgaaaggttggctgaatgtccgcttactgccatcggattcttcgatggtaacaataagatcgctgccgtacccactcggactcagatcatcaatgacgaaagcgcctggcggcaccgtcgtttcataaatcttatagccaccttgcgtaatagtgactttggcgttggtattggcaacgccatgaatgataggcgcaaagctggctaaagtcggaggcaacatgcggctgtcactgtataaacgaatgcctcggatactgacggaatcaaaggtttcgcccgtcgtataagactcaccaagaatgagttgagaacgcaggctggcgatatcacgctgaacataccgattcttaaaatcataattactgccagaatcggtcatccagttgtagttgccgctggcacgcagtcgccatgcacctaaattcatcccaccgttaaatgcagcataaatgctttcattttttcgaccaggggtttcactatgatatccgttgaggttgtaactcaacatggccgcattaatgccgttttcccataagcttggatcaacatagttttggtaatttttcattacccaggcttgaggaacgtctatatccagacgttgatcgttaacgtcataacgaacagaagcctgagggataatttccgtcaaattgaggcaattgccgagcgtttcatccctggcaagcagaacggctttttcgttatttatatcgggagaattaatatgaaactgcaataaattctttaatgtgatacaagcctgggcgttcttttttccttcaattgcgacaaatgtaatactttggttaatgattggttggtcgtttacataaacactgacgtcgtaaacacccggtatagcggggttaccttcactgtaccggctgagatcaatattagatgcattctgccccatcaggaaggtatggtcatattcaacgagttcagcactgaaagcagtattgcaatacagcagcgcgcaaaacgtggcgatacgggtcagatgatgataatttttagtatattctatagtcacgctatgcttcctgcggaattatatccttgcctgattacagcctggcattaccttcaattgcgccaccaaagtcattaatggcgtaaaaatgcacttttgcagaattcgctttgccattaaggccattgactttcatgacctcatcactaaatggtgcaatcattttcacatcaatcggatagcgtttaccgctagcttctaaatcaccactgctaaaagagacgtagtaaggggttggattggtcactcgtaaactcgccttaccttcactaccactccagaaccacttcagggctaacggggcttcagagggatttcccttcaatccatccgggcgatagaaaagttttatacgtgtgcgaaatgccagttgcagcaggctttgattcgcgaccttttctgcatctggttttggtggaacttccagtacgttaaaccagaacacgctctctctgtctttaggcagactggtgctggctgtgtacattaatttgattgtttgcccacgtttggcatcaatacggcttactggcggcgtagcagtaaaagggactgtaatactgccaggctcagcgttgtcatcgccagtatctaaccaactctggacaagcaacgggttattccctttattttccagacgtacgttgacacttttttgatcgcttttatatattacgcgagtaccgctaatgacaatgtccgcaatagagctactactaaaagccatacaggttacgaagcataaagctgttgtatgtttggtgttaaaaaacataaaccatccctgatagagttaattaaaacagggaataatataaaatagaaattattattccctgtatattcattcaatcaatttaactggtgaatacttactgataagtaatggtgtatgcagtgttagtttttacataaccagcagttgctgtttggtctgcgacggcacgaacgtaagacgctttaaaatcataaacagcagattttgtcgttgcatccagggctttagtatacacatcgccagggttgttaatttgaacctgtttgatagtggaaccatcaatattgtgtagagcgatattaacgccgtcagatgggttgttaatagacatgtcgttgttcaaagtccctttgctgttaccaaagaaaacagaaccgaaggtcattttagccgtgctacctggattcggatttgctttgctgcagtcaacggtgatgctgaaaggtttagctttagcgccaacggtgtcattcagtacgccagcatcgatttcaccaacggttgcggtttgcagcaggatcagaccatccttgttaccgccgtcaacgcgggtttcacaggtgttatcaacaaccagaccactgatatttaactgaccgccgtccatatcagcagaagcagtacctgcaaccatcgccagcataagaccagacagggcaaaacctaattttttagacataaaaatcctttaataaaattccattagtcagactacatgtttgaagaatgactattcatgacacaaataggagaaacaaatgttagatattaatgagcaatgatatttgttacccaaatttacaaccattgttcattaggtcgcctattgtgcactttagaagcttttgaacaaattaaatttacttaattcaaaattaagtaaaaataagttcacaagtgcaattggttagggtatggagatgggattgatatttatttataggaagttatattatttccgcaaagagatgtttaaactaaaatcgtaattaaggaaagagatgagatatgattttcagaaaatatttatattcgcaatataaataaattaccatttgtttaatttgtcaaatgctcttgtatgtaagatttgacgcaacatctccccatcaggaaacaccaactccggcgcgatttcaaacagcggccacagcataaatccacgattcttcatatcgtagtgcggaacggtcaggcgttcagtatttatcacttcattaccaaacagcatgatgtcgagatccagcgtgcgtggtccccagcgttcagctttgcggacgcgaccttgctgcaattcaatacgctgtgtgtgattgagtagctcttcaggtgcaagagaggtttccagcgccacggctgcgtttaagtaatcgggttgatcttgcggccccagcggtggggtgcggtaaaagctagaaacggtaagaatgtggctttcagggatatcgcctaatgctttcagggcagcattgacctgctccagcggagaggccagattgctgcctatggcaatatacgccactgtcatgcggtaccctcacgacgtggtgcgcgtttgcgtggacgacgagtacgacgacgcggactcggttcttcatccagctcgttgagcatccctttttggtctggtggcgcggaaacctggaactcaccccaccatttcaccagacgctgcagttcagcgttacgctcaacttcagctcgcaaggccaacaggtcataagccgcacggaacttaggatgctccagcagtttccatgcgcgtttaccctgacgacgggacatacgcaactgcaactgccagatatcgcgggttaatgtcgtcagacgtttcgggattgccagactacggcaggcttcgtccagcacgtcgttcatcgccagcgcgaaagcgtcgtgataggtcaggccgctttcctgggcgatcttctgtgccgtctccagcagtgggtaccagaacatggcggcaaacaggaacgccgggttcacgcgcatatcgttatggatacgcgtatcggtattcttcagcacctgttcaatgatccgctccatcgggctgtcgccattttccgtgaagtagcgggtaatggtcgggaacagcggctggaacagatgatattcacacaacagcttataggtttcgtaaccgtagcccgcttgtagcagtttaaggctttcttcaaacaggcgtgccggtgggatatcgttcagcagggtagcgaggcgagggatcggttctgcggtttccgggctgatgcgcatacccaatttggcggcaaaacgtaccgcgcgcagcatacgtaccggatcttcacggtagcgcgtttccgggttaccaatcagacggataacgccgtccttcagatccttcatgccgccaacgtaatcacggacggtaaaatccgctacgctgtaatacaggctgttgatagtgaaatcgcggcgctgggcgtcttcttcgatggagccgaaaatgttgtcgcgcagcaacatgccgttttgcccgcgttgggaggtcgtgcggtcgctgacgttaccttcgtggtgtccacggaaggtcgcaacttcgataatctccgggccaaacattacatgagccagacggaaacggcgacccaccaggcggcagttacggaacagtttgcgcacctgctcaggcgtggcgttagtggttacgtcaaaatctttcggctttttgccaagtaacaggtcgcgcacgccgccgccaaccagccaggcttcgtatcccgctttattgagcctgtacattaccttcagggcattttcactgatatctttgcgggaaatagcatactgctcacgcgggatcaccgtcacctgtggacgggcgactgcctgttcagcctcgctttcctcgcggcttagcaccttgcggcaaaaattagcgactcgggtaaaaatagtacacctcggtagtgtcaaacatcattcaggacaaaaaaatagcggctaatcatagctcagcaactcgcattactgaatgtactatttacaattgcgctctcgggcacggcggtaagccgccagtttttgacggcactctgaaggatttgctcgacgctgaaatcctgccagtgtgcttctgcctgctgccccagaaattgaagtgccgcgattagtaccgggcgtggatcgcctttcggcaacgcaggcgcatgattctgcttggaaagtttagcgccttgtggattaagcgccagcggcagatgaatgtaatctggcactttccagccaaaaagctggtacaggctgatttgccttactgttggttcaatcagatcagccccacgcactatttctgtaacgccctggaaatgatcatcaaccacaacagccaggttgtaggcgaacaacccatcacggcgatgaatgataaaatcttcccgtgccagtttttcgtcggcgtgaataatgccgcgcagctggtcagtaaattgcgtgaccggatgctgctggcggatacgcactgcggcgttgtctggtccatgatgcaacacccggcaatgaccgtcgtaaataccgccaatgctttgaatacgcgcacgcgtacaggtgcagtaataacttagtccttgttcatgtaaccaggcgagtgcttcacgataggcgtcgtgacgttggctttgccagagaacatcgccgtcccagtgcagaccgtaatgttccagctggcgcaggatagtttctgcggcaccgggaacttcacgaggcgggtcgatatcttctatgcgtaccagccagcgaccttgccgggcgcgagcctgcaaatagctgccgagcgcggcgatcagagagccaaaatgaagctcgccggaaggagagggggcgaagcggccaatatactgtgtgtctgtcatctctttgaacaaaaaataaggcgggagcatttcccgcctgtggtaaacgtgatggaacggctgtaattagccagccatctgtttttcgcgaatttcagccagcgttttgcagtcgatgcacagatcggctgtcgggcgcgcttccagacggcgaataccaatttcaacaccgcaggattcgcagtagccgaaatcttcgtcttccacttttttcagcgtcttctcgatctttttgatcagcttacgctcgcgatcgcggttacgcagttcgaggctgaactcttcttcctgggctgcacggtctaccgggtccgggaagttggctgcttcatcctgcatatgtgtaacggtgcgatcgacttcatccctgagttgattacgccatgcttccagaatacgacggaagtgcgccagctgggcttcattcatatactcttcgcccggcttctcctgatatggttccaccccagcgatggcgagaatactcagggagcttgttttacggttttgcccttcttgcatgttgcttctccttaacacgcactatcgatccccatgttcgggggaaaaatgaggccgctataaatagcagatgcttttccggatagcaattatctaaacgtaacacttgacaactgtgtgaggaaaagcgtatttgcgcacgcgaccagaatgtaaattaaccagttacttactttattacaatgtaaccggcagactttttttaagagccatgccttcagcagaaatttccgctttgtaagccagaatttctacccccctctgttgagcttcactcaatagttgcgcgtatttctcatcgatgtggcgcgcgggactaaaccgtgtaatggcactatgcagcacggcgaaaaagataaccgcacgctggccttcagccgctacgctcatcaactcccgaaggtgtttctgacctcgttcagtgaccgcatcgggaaaatatccctgttcgttctccgctaacgtaacgcttttcacttcaatatagcagtctggacggctatccgcctgcaacataaagtcaatacggctgcgttctgcgccgtattttacttcgcttttcaggctgctatagccactcagttcactaatactttcattaaggatagcctctttcgtcaacctgttagcccaaagcgtgttgacgcaaataaatgcgccgctctggctttgagttaattcccaggtgtgtgggtatttccgtttggtgttgtcactagtgctataccagacggtatcgccaggcgttgcacaaccggtcatcgcacccgtattcgggcagtgtagcgttaattcgcgaccatcgggtgtgatcacatcggctaaaaaacgtttgtaacgctgaattagcgtcgcgcgctgtagagggggagaaaattccattgcgacaatccttgttattgcgttagcgcccagcgttttagcggcgtgtagcgtgtgcgtccacgggcaaagctggaggcgtaaagggtgaactccgtcaccgcatagctccagttaaaacctggcggcgggattgtcaccgcctcgctggcgtcgcgcaataaggtaatatgtggatgaaacggacgattgctttgaaaacaaccgctgcgggcagcctgactacggagcatattcgccagctggattaagccgcgtggcggctgacgcatccctaaccacaccacacggctacgcagccattgtccggcgtcatcaagcgtgagtgtgaaaccaggttgacgaatccgtccggctaaaagagaaagcgccttctctttctcggcgctcacttcgcctaaaaatgccagagtcagatgcaaattatcggcggcgaccggacgtcccgcctcaggtgggaagtgtgtggcgcgccaatggataatctgttcgcggatttctgcaggtaagtcgatagcaaagaacagacgttgcggttcagacatgtgaggcactcggttatgaattaccgcgatgctacaatgtggcgcgaagaatgttaaccctctggagcgttttgtgagcagcttgcccgttgctgccgtcttacctgaattacttaccgctctcgattgtgcgccgcaggtattattaagtgcgccgaccggggccgggaaaagtacctggctgccgctgcaactgctggcgcatcccggcattaacgggaaaattatcctgctggagccgcgtcgtctggcggcgcgtaacgtcgcgcaacggctggcggagctgcttaacgaaaagccaggcgataccgttggctaccggatgcgtgcgcaaaactgcgtcgggccgaatacccgcctggaagtggttaccgaaggcgtgctgacgcgcatgatccagcgtgacccggaactgagcggtgttggactggtgatccttgatgaatttcatgagcgcagcttgcaggcggatttggcgttggcgctgttactcgatgtgcaacaaggtctgcgtgatgaccttaaactgctgattatgagcgctaccctggacaacgaccgcttgcagcaaatgctgccagaagcgcctgtcgtcatcagtgaagggcgcagctttccggttgaacgccgttatttaccgctgcccgcgcatcagcgttttgacgatgccgttgcggtagccaccgctgaaatgctgcgtcaggaaagcggaagtttactgttatttttacctggcgtcggagaaattcagcgtgtgcaggaacaactggctagccgcatcggcagtgatgtattgctctgcccgctgtatggcgcgttgagcctgaacgatcagcgaaaagcgatcctcccggcaccgcaagggatgcgcaaagtggtgctggcgaccaatattgctgaaaccagtttaaccattgaaggtattcgtctggtggtggattgtgcccaggagcgtgtggcgcgttttgatccgcgcacggggcttacgcgactgattactcaacgcgttagccaggcatccatgacgcagcgtgccgggcgcgccgggcgtctggagccgggtatcagcctgcatttaatcgccaaagaacaagcagaacgcgccgcggcgcaaagtgaaccggagatcttacaaagcgatctttccggtttgctgatggaattactgcaatggggatgcagcgatccggcgcagatgagctggctggatcaaccgccagtagtgaatctactggccgcgaaacgtctgttacaaatgctgggggcactggagggtgaacggcttagtgcgcaagggcaaaaaatggcagcgctgggtaacgatccgcgtttagcggcaatgctggttagcgcgaagaacgacgacgaagctgctaccgcggcaaaaattgccgccattctcgaagagccgccacggatgggcaatagtgacctgggcgtggcgtttagccgcaatcaaccagcctggcagcaacgtagtcagcaactgttaaaacgcttaaacgtacgtggcggtgaggcagacagtagccttatcgcgccgctacttgccggggcgtttgccgatcgcattgctcgtcgccgtgggcaagatggacgctatcaactggcaaacggcatgggagcgatgctcgatgccaacgacgcgctaagccgccacgaatggttgatcgcaccgttattattgcagggcagcgccagcccggatgcgcggattttactggcgctgctggtcgatattgatgagttagtacaacgctgcccgcagctggtacagcagtctgacactgtggagtgggatgacgcgcaaggtacgctgaaagcctggcgtcggctacaaatcggtcagttgacggtgaaagtgcagccgctggcgaaaccgagtgaagacgagttgcatcaggcgatgcttaatggcatccgtgataaaggtttaagcgtgctcaactggacggcggaagcggaacagctacgcttgcgtttgttatgcgccgcaaagtggttgccggaatatgactggccagcggttgatgatgaaagtttattggcagcgctggaaacgtggctgctgccacatatgactggcgtacatagtctacgcggcctgaaaagtctcgacatttatcaggcactacgcggattacttgattggggaatgcagcaacgtctggatagtgaattgcctgcgcattacactgtgccgacgggaagccggatcgccattcgttatcatgaagataacccgcccgcgctggcggtgagaatgcaagagatgtttggcgaggccaccaatccgacgatcgcccaggggcgcgtgccgctggtgctggagttgcttagtcctgcccaaaggccattacaaatcacacgagatttgagcgacttctggaaaggagcgtaccgtgaggtgcaaaaagagatgaaagggcgttatcccaaacatgtctggccggacgacccggcaaatactgcaccgacgcgacggacgaaaaagtatagctaaggttggttttctccctctccctgtgggagagggccggggtgagggcatcagcgcgcacgttcaccctcaccctaaccctctccctcaagggagaggggaccgatcgagcacaaattttgagagatatcttcttctgtcttgtaacagaagaacagaaaatcgggcttttgcgcctgaatattgcggagaaaaagcatggccgggaatgaccgcgagccaattggacgcaaagggaaaccgacgcgtccggtcaaacaaaaggtaagccgtcgtcgttacgaagatgacgatgattacgacgattatgatgactatgaggatgaagaaccgatgccgcgcaaaggtaagggcaaaggcaaagggcgtaagcctcgtggcaaacgcggctggctatggctactgctaaaactggctatcgtttttgccgtgctgatcgccatttacggcgtttatctcgatcaaaaaattcgtagccgtattgatggcaaggtctggcaactgcctgcggcagtttatggccgaatggtcaatcttgagccagacatgaccatcagcaagaacgagatggtgaagctgctggaggcgacccagtatcgtcaggtgagcaaaatgacccgtcctggcgaatttaccgtgcaggccaacagcattgagatgattcgccgtccgtttgatttcccggacagtaaagaaggacaggtgcgcgcgcgtctgacctttgatggcgatcatctggcgacgatcgtcaatatggagaacaaccgtcagttcggtttcttccgtcttgatccgcgtctgatcaccatgatctctagcccaaacggtgagcagcgtctgtttgtgccgcgcagtggtttcccggatttgctggtggatactttgctggcgacagaagaccgtcatttttacgagcatgatggaatcagtctctacagtatcggacgtgcggtgctggcaaacctgaccgccggacgcacggtacagggtgcgagtacgctgacgcaacagctggtgaaaaacctgttcctctccagcgagcgttcttactggcgtaaagcgaacgaagcttacatggcgctgatcatggacgcgcgttacagcaaagaccgtattcttgagctgtatatgaacgaggtgtatctcggtcagagcggcgacaacgaaatccgcggcttcccgctggcaagcttgtattactttggtcgcccggtagaagagctaagcctcgaccagcaggcgctgttagtcggtatggtgaaaggggcgtccatctacaacccgtggcgtaacccaaaactggcgctggagcgacgtaatctggtgctgcgtctgctgcaacagcaacagattattgatcaagaactctatgacatgttgagtgcccgtccgctgggggttcagccgcgcggtggggtgatctctcctcagccagcctttatgcaactggtgcgtcaggagctgcaggcaaaactgggcgataaggtaaaagatctctccggcgtgaagatcttcactacctttgacagcgtggcccaggacgcggcagaaaaagccgccgtggaaggcattccggcactgaagaaacagcgtaagttgagcgatcttgaaactgcgattgtggtcgtcgaccgctttagtggtgaagttcgtgcgatggtcggaggttctgagccgcagtttgcgggctacaaccgtgcgatgcaggcgcgtcgtagcattggttcccttgcaaaaccagcgacttatctgacggccttaagccagccgaaaatctatcgtctgaatacgtggattgcggatgcgccaattgcgctgcgtcagccgaatggccaggtctggagtccgcagaatgatgaccgtcgttatagcgaaagcggcagagtgatgctggtggatgcgttgacccgtagcatgaacgtgccgacggtaaatctggggatggcgctggggctgcctgcggttacggagacctggattaaactgggcgtaccgaaagatcagttgcatccggttccggcaatgctgctgggggcgttgaacttaacgccaatcgaagtggcgcaggcattccagaccatcgccagcggtggtaaccgtgcaccgctttctgcgctgcgtagcgtaatcgcggaagatggcaaagtgctgtatcagagcttcccgcaggcggaacgcgctgttccggcgcaggcggcgtatctgacactatggaccatgcagcaggtggtacaacgcggtacgggtcgtcagcttggggcgaaatacccgaacctgcatctggcagggaaaacagggactaccaacaataacgtagatacctggtttgcgggcattgacggcagcacggtgaccatcacctgggtcggccgtgataacaaccagccgaccaaactgtatggtgccagcggggcaatgagcatttatcagcgttatctggctaaccagacgccaacgccgctgaatcttgttccgccagaagatattgcagatatgggcgtggactacgacggcaactttgtttgcagcggtggcatgcgtatcttgccggtctggaccagcgatccgcaaagcctgtgccagcagagcgagatgcagcagcagccgagtggcaatccgtttgatcagtcttctcagccgcagcaacagccgcaacagcaacctgctcagcaagagcagaaagacagcgacggtgtagccggttggatcaaggatatgtttggtagtaattaacatctaagcgtgaaataccggatggcgagttgccatccggtaaaataacatcccatctaagatattaaccctttcttttcatctggttgtttattaacccttcaggaacgctcagattgcgtaccgcttgcctgtaagactcaatgtaagccgtgccaaaatatgatggctaggacgagctagaacccgccagcgtttcgaatattatcttatctttataataatcattctcgtttacgttatcattcactttacatcagagatataccattccatataacggccctgtacgcctggacggataaagcgtttacgcgacaacggatgcccgatgcgacgctggcgcgtcttatcgggcctacaaacggccccgaatcgtaggtcggataaggcgttcacgccgcatccgacaaaccatgctggatcacaacttcgcaaacacccgacgtgcagcatcgatggtgttattgatatcttccatgctgtgcgccacggacataaagcccgcttcaaacgcactcggtgccaggtaaacaccttcgtccagcatcatatggaagaaacgcttaaagcgttccacgtcacaggccatcacatcctgatagcacgtcacggactcggcgtcggtaaagaaaataccgaacatgccgccaacgtggttaacgaccagcggaattccggcttcttctgccgcttccagcagaccttctgccagacgtgttgtcagctcatccagcgtttcgtgaacgcccggctgcgcgacttcattcagacaggcgaaacccgctgccatcgcaatcgggttaccggaaagcgtacccgcctgatagaccggacccgtcggggccagcgcatccattacatcacgacgaccaccgaatgcgcctaccggcattccaccgccgatgattttgccgaggcaggttaaatctggcactacgccgtaataatcctgtgcgccagctagcgctacgcggaaaccggtcatcacttcatcgatgatcagcaacgcgccaaattcgtcgcacagcgcgcgcagacctggcaggaactctggcagcggcggaacacagttcatattgcctgccaccggctcgacgataatacaggcaatctcttgcgggtattgctcaaatgcggcgcgtacagaagccagatcattataagtacaggttaaggtatatttggcgaaatctgccggaacgcccgggctgtttggctggcctaacgtgagtgcgccagaaccggctttcaccagcaggcagtcagcgtgaccatggtaacacccttcaaatttaataattttgtcgcgaccggtaaaaccacgggccaggcggatggcgctcatggtcgcttcagtgccggagttcaccatgcgcaccatatccatggtcgggaccagttcggtcaccagttgcgccattttcacttccatttcggttggtgcaccaaagcttaaaccacgctcggcggcttcaatcacggcattgcggattgccggatggttatggcccagcaccatcggcccccaggaaccgacataatcgatataggctttgccatcaacatcgtacagataagcgccgtccgctttttcgataaacagtggagtgccgcccacgccagtaaaggcgcgaacaggggagttcacaccgccagggatcagctcgcgcgctgcgctgtaaagattttcagacttactcatggagggttcctgattcgtagaaaaagtgaatggctgctattctatgttattcataacaagttaaatactcgtcaaacatcaggctgcttgtactggtgcaatcctgatttcttagagtataaaagttttgtgcatttgaaacattacgctttgcaaaggattttcatggaacgtgcgagtaaaatgccgtcatcttatttgtatgaccaataagtgatcattggatgaaaactgatactccctctttagaaacaccgcaggccgcgcgcctgcgacgcagacaactgattcgccaacttcttgagcgcgataaaaccccgttagccattttgtttatggcggcagtcgtcggcacgcttgttgggctggcagcggttgcttttgacaaaggtgtcgcctggttgcagaaccaacgtatgggggcgctggtacatactgctgataattatccgcttctgttaaccgtcgcttttctctgtagcgcggtgctggcgatgtttggctactttttggtgcgcaaatacgcgccggaagcaggtggtagcgggatcccggaaattgaaggggcgctggaagatcaacgtcccgttcgctggtggcgtgtattgccggtgaagttctttggcgggctggggacactcggcggaggcatggtgttggggcgcgaagggccaaccgtgcagatcggcggtaacattggccgtatggtgcttgatattttccgcctgaaaggtgacgaagctcgccatacgctgctggcaaccggtgctgctgcggggctggctgcggcctttaacgcgccgctggcgggtattttgtttattatcgaagagatgcgtccgcagtttcgctatacgttaattagcattaaagcggtatttattggtgtcattatgagcaccattatgtaccggatttttaatcatgaagttgcgttgattgacgtcggtaaactttctgatgcgccgcttaatacgctgtggctttatctgatcctcggtattatttttggcattttcggccctatttttaataaatgggtgctggggatgcaggatttgctgcaccgtgtgcacggcggcaatattaccaaatgggtgctaatgggcggtgcgattggcggtctgtgtggattgctggggtttgtggcaccagcaacgagcggcggcggttttaacctgattcctatcgctaccgcggggaatttcagcatgggaatgctggtgtttatcttcgtcgcgcgggtcattaccaccttactctgcttctcttccggcgcgccgggcggtatttttgccccgatgctggcgctgggtactgtgctgggaaccgctttcggaatggttgccgttgagctgtttccgcaatatcaccttgaggcggggacgtttgctattgccggaatgggggcattactggcggcatctattcgcgcgccgttaacggggatcattctggttctggagatgaccgataactaccagctcattttgccaatgattattaccggtcttggcgcaacactattagcgcaatttaccggcgggaaaccgctatacagcgcgattcttgcgcgcacgctggcaaaacaggaagctgagcaactggcgcgaagcaaggccgcaagtgccagcgagaatacttgaacgaaataccagggtattagataatggcgattattattgggttagaatttgcccaattgccgatgtcgtttggagcaaaatatgagtgatgacgtagcactgccgctggagtttaccgacgcagcagccaacaaagttaaaagcctgatcgctgacgaagataacccgaatctgaaattacgcgtgtatatcaccggtggcggttgcagcggcttccagtatggtttcacctttgatgatcaggtgaacgaaggcgatatgaccatcgaaaaacagggcgttggcctggtggttgatccgatgagcctgcaatatctggtcggcggttccgttgattataccgaaggtctggaaggttctcgtttcatcgtgaccaacccgaacgcgaaaagcacctgcggttgcggttcttcctttagtatctaatctgttgttcatgtgccggataaactatccggcacatcttctctcttcaacgcccattctcatccagcgcaaacgtcggtagcttaagatgccaacgaatagccgccagccgaatcaatagcgtcacgaccatgcccatcatactggctgtttccagtggtacggaaaatgtgtaataagccgtagcgtggacaataccgccgataatacaggcagttgcgtagatttctgtacgtaaaatcatggggatttcgcgggccagaacatcacgaatgatcccgccgccaacgccagtaatgacgcccatacaaaccgcgattaacggaccggcttccgcattaaaggctttattcacgccaatgccgacaaacaccgccagaccaacggcgtccagcaccggcaacatccattttggtaagcgtcttggctggcgcaccagcacgatggtcagcatgctggtgaccattgcaacgaccagatcggtgggatctttcacccaaaataccgggccgtgatccagcgccatgtcgcgaattgtcccgccgcctactgcggttaccacgcccagtaccagaacaccaaaagggtccatacgcaattttccggctaacaaaacgccggagatggcaaataccgctgtgccgactatattcagccaatagacgagcattgttcaatccccactgagcacctgaaaaggtcaggcgttaatctacctgactaagcgcattacagagctgttgtgcagcgaggataatacgtgggcttgcacgttcaaaccagtcactcgtgagaggaataacgggaattttgagctgttcaccccagtattgtttgattttaggaatttggtccggtccgcctgtaatgacaatcgcctgtgggctgcgtgctaacacctgttcgcggctaacttgcggccagggaacccggctgtctttaaagatgttttctccgccacaaacttcgagtacctggttctgaatgctctcttttccactggtaaatggcggattaatgccgaattgcagaaaaacacgttttttaggtttatcagcatattgcgctttcaattgcgcgtactgatccagcagggattgcgcggcttgttcggccttgtctggttgcggactccagggggccagttgacgtaacgcattggcaatttgttcaatgcttgtcgcatcgacccacatcacttttattcccaggctagccagctggtcaacctgccgctcggcattacctccacgccaggcaatcaccagatcgggtttcagcgcgacaatgcgttccagattcatcccctgccaggtggaaacctgctcaatcttttgcgcttgtggaggatagtcggaatagctgctgaccccaaccggcgtgatcccggcggcaaaggcaagttcagtgttggcgggagaaagcgtgatgacgcgcggcgcggcgttgagccacagtggcgcaagaaaagacagggcgaccagcgccctgaacagactcttagccatgtgcaagtttctgcaccagactctcaaccatcaggctggactgtttagcggcaacagccaggaactcatcgaagctaagatgagactgttgatcggccacgtcggagatggcgcgtacgacaacaaacgggacgttgaaattgtggcagacatgggcgattgccgtcgcttccatctctacagcaatggcctgtgggaagttgtggcggattttcgccagaccaacagaaccgttgatgaaagcgtcgccgctaacaatcaggccacgtacagcgttaagattcagttcggcaatgcaggcctcagcggcagcgatcagtttatcgtcagctttaaagcctgccggacagcctggtaactgaccgtattcataaccaaatgccgtgacatccgcgtcgtgataacgtgcttcgtcgctgacaacgatatcgcccactttcaacgttggtgccaggccaccggcagaaccggtgttaataatcacatctggcttgcagtgttccaacagcaaagtggcacccagcgccgcagcgactttaccgatgccgcttttcagaagcgcaacctcggttccattcagttggccggtatagatttcgcaaccgccgagactgatagtttgacggttttcgattttgtcacgcagcagcgtaacttcttcttccattgcaccaatgatgccgattttcatagatttactcgcgataagcccgatttgaaggcatagtttaccatgcgcttacggggaagcgtatttctcacgcgggagaggacatggcacagattgatttccgaaaaaaaataaactggcatcgtcgttaccgtagtccgcagggcgttaaaaccgaacatgagatcctgcggatcttcgagagcgatcgcgggcgtatcatcaactctccggcaattcgtcgtctgcaacaaaagacccaggtttttccactggagcgcaatgccgccgtgcgcacgcgtcttacccacagcatggaagtccagcaggtggggcgctacatcgccaaagaaattttaagccgtctgaaagagcttaaattactggaagcatacggcctggatgaactgaccggtccctttgaaagcattgttgagatgagttgcctgatgcacgatatcggcaatccgccgtttggtcattttggcgaagcggcgataaatgactggtttcgccaacgtttgcacccggaagatgccgaaagccagcctctgactgacgatcgctgcagcgtggcggcactacgtttacgggacggggaagaaccgcttaacgagctgcggcgcaagattcgtcaggacttatgtcattttgaggggaatgcacaaggcattcgcctggtgcatacattgatgcggatgaatctcacctgggcacaggttggcggtattttaaaatatacccgtccggcgtggtggcgtggcgaaacgcctgagacacatcactatttaatgaaaaagccgggttattatctttctgaagaagcctatattgcccggttgcgtaaagaacttaatttggcgctttacagtcgttttccattaacgtggattatggaagctgccgacgacatctcctattgtgtggcagaccttgaagatgcggtagagaaaagaatatttaccgttgagcagctttatcatcatttgcacgaagcgtggggccagcatgagaaaggtagcctctttagcctggtggttgaaaatgcctgggaaaaaagtcgcagtaatagtttaagccgcagtacggaagatcagttttttatgtatttacgggtaaacaccctaaataaactggtaccctacgcggcacaacgatttattgataatctgcctgcgattttcgccggaacgtttaatcatgcattattggaagatgccagcgaatgcagcgatcttcttaagctatataaaaatgtcgctgtaaaacatgtgtttagccatccagatgtcgagcggcttgaattgcagggctatcgggtcattagcggattattagagatttatcgtcctttattaagcctgagcttaagtgactttactgaactggtagaaaaagaacgggtgaaacgtttccctattgaaagccgcttattccacaaactcagcacgcgccatcggctggcctatgtcgaggctgtcagtaaattaccgagtgattctcctgagtttccgctatgggaatattattaccgttgccgcctgctgcaggattatatcagcggtatgaccgacctctatgcgtgggatgaataccgacgtctgatggccgtagaacaataaccaggcttttgtaaagacgaacaataaatttttaccttttgcagaaactttagttcggaacttcaggctataaaacgaatctgaagaacacagcaattttgcgttatctgttaatcgagactgaaatacatgaaaaaaaccacattagcactgagtgcactggctctgagtttaggtttggcgttatctccgctctctgcaacggcggctgagacttctagtgcaacgacagcccagcagatgccaagccttgcaccgatgctcgaaaaggtgatgcctagtgtggtcagcattaacgtagaaggtagcacaaccgttaatacgccgcgtatgccgcgtaatttccagcagttcttcggtgatgattctccgttctgccaggaaggttctccgttccagagctctccgttctgccagggtggccagggcggtaatggtggcggccagcaacagaaattcatggcgctgggttccggcgtcatcattgatgccgataaaggctatgtcgtcaccaacaaccacgttgttgataacgcgacggtcattaaagttcaactgagcgatggccgtaagttcgacgcgaagatggttggcaaagatccgcgctctgatatcgcgctgatccaaatccagaacccgaaaaacctgaccgcaattaagatggcggattctgatgcactgcgcgtgggtgattacaccgtagcgattggtaacccgtttggtctgggcgagacggtaacttccgggattgtctctgcgctggggcgtagcggcctgaatgccgaaaactacgaaaacttcatccagaccgatgcagcgatcaaccgtggtaactccggtggtgcgctggttaacctgaacggcgaactgatcggtatcaacaccgcgatcctcgcaccggacggcggcaacatcggtatcggttttgctatcccgagtaacatggtgaaaaacctgaccagccagatggtggaatacggccaggtgaaacgcggtgagctgggtattatggggactgagctgaactccgaactggcgaaagcgatgaaagttgacgcccagcgcggtgctttcgtaagccaggttctgcctaattcctccgctgcaaaagcgggcattaaagcgggtgatgtgatcaccagtctgaacggtaagccgatcagcagctttgccgcactgcgtgctcaggtgggtactatgccggtaggcagcaaactgaccctgggcttactgcgcgacggtaagcaggttaacgtgaacctggaactgcagcagagcagccagaatcaggttgattccagctccatcttcaacggcattgaaggcgctgagatgagcaacaaaggcaaagatcagggcgtggtagtgaacaacgtgaaaacgggcactccggctgcgcagatcggcctgaagaaaggtgatgtgattattggcgcgaaccagcaggcagtgaaaaacatcgctgaactgcgtaaagttctcgacagcaaaccgtctgtgctggcactcaacattcagcgcggcgacagcaccatctacctgttaatgcagtaatctccctcaaccccttcctgaaaacgggaaggggttctccttacaatctgtgaacttcaccacaactccatacatcttcatcatcctttaggcatttgcacaatgccgtacgttacgtacttccttatgctaagccgtgcataacggaggacttatggctggctggcatcttgataccaaaatggcgcaggatatcgtggcacgtaccatgcgcatcatcgataccaatatcaacgtaatggatgcccgtgggcgaattatcggcagcggcgatcgtgagcgtattggtgaattgcacgaaggtgcattgctggtacttagtcagggacgagtcgtcgatatcgatgacgcggtagcacgtcatctgcacggtgtgcggcaggggattaatctaccgttacggctggaaggtgaaattgtcggcgtaattggcctgacaggtgaaccagagaatctgcgtaaatatggcgaactggtctgcatgacggctgaaatgatgctggaacagagccggttgatgcacttgttggcgcaggatagccgtttgcgggaagaactggtgatgaacctgattcaggcagaggagaatactcccgcacttactgaatgggcgcaacggctggggatcgatctcaatcaaccgcgagtggtggctattgttgaggtcgacagcggtcagcttggcgtggacagcgcaatggcggagttacaacaactgcaaaacgcgctgactacgcccgagcgtaataatctggtggcgattgtcagcctaaccgaaatggtggtgttgaaaccggcgttgaactcttttgggcgctgggatgcagaagatcatcgtaagcgagttgaacaactgattacccgcatgaaagagtacggccagctgcgttttcgcgttagtctgggcaactattttaccggtcctggcagtattgcccgatcctatcgtacggcgaaaacgacgatggtggtgggtaaacagcggatgccagaaagtcgctgctatttttatcaggatctgatgttacctgtgttactcgacagtttgcgtggcgactggcaggccaacgaactggcgcgaccgctggcgcggctgaaaacgatggacaataacggcttgctgcgacgaacgctggcggcgtggtttcgccacaatgtgcaaccgctggcaacgagtaaggcgttgtttattcatcgtaataccctggagtatcggcttaatcgtataagcgaactgaccgggcttgatttgggcaattttgatgacaggttgctgctgtatgtggcgttacaactggatgaagagcggtaagttatgcgttaaggttgaggcggcgctggctcattcccctcagcccgaagggtagaggggaatgcccgaattaaccgtcagttcgggattatttacgcgttagtttttccagatcggcttcaatctcgctgatcttattggttacgacactctccaggtgacgtaagtcgtcgaggatcttacgcttaagatcaacttcgctgcggtcacgctggcagatttgatcaagctcatcaatgatataccgtagattcgggctgatttcctggacttctttataaccctgacccacaccatcagcgacgaccgttttacgctgacgcggatatttaaacttaacgctcttggcgaaaaactcgcctttgtctttctggaaatagattttcagaatatcgttgttggcttcctgccggaggctgtaacgatcaatttcttcaggattggtaatacccagacttttcagattgtcgtacatagcgttacctcaaaatgagtcagtaaattgtgcttattttagcatttggcctggcccgcccggctcgactgtgatcgcagaaagcctttttcttccagacttctatcatggcgtaaaaatcaaaaaattacctgctttattctggtgataaaattcacgatttacaccagttccagcatcgttacttccgggcggcagttcagacgcaaaccatacaaactgcccacgccacgggttgtgtagatgtgtctttcgccaaaggcatttaatccggcgacgtaacgtttatcttcgacaggggcaaaaggttcaccaaccaacggtacgcgcagttgcccgccgtgagtatggccgcacagcatcagatcccagggttcatcacgcatgacttctttgctgtcgggattatgcgccagcaccagtcttggcagattggcttcgctggcgggaggcggtttgcattgtccggcccataagtcaccagtgcctaccagttcgaattgcctgttcggcgtggcgatcaccgtagcctggttaaacaacaccgtgatgcccgcacttttcaacgtctcgccaattaagtgatttttttctgtaccaacagggcgatcgtggttgccgaagcaggcaaacgtcggcgcacattcggcaaggggggagagtacgtcactaaacgcgctaaaattcaggctcatatcaaataatacgtaatcgccgcccagtaatatcaaatcgggcttttgttctatgccaagagcaatcgcgtcagaaatcaggcttaaaggaacaaaacgagagtaatggagatcggccagaaaaagaattttgaatggtgctgcgttgtctttaaaaaaggcgaggcggtgacggattaattcaaaccagcctggctcacagtaatgcatataaccgaaaccactgctcgtggctatcgtcgcggcagtagcctgcaaaaatcggcggcgactaatcatcgctcatccctgcaaaaaaatcgggcagcgtcgtgctgcccgtgtgcatacttttagtcgatggtacgcagcagttcgttaatgccgactttgccgcgagttttcgcgtcaactttcttaacgataaccgcacagtagaggctgtatttgccatctttactcggcagattaccactaacaaccacagaccccgccggaacgcgaccgtagtggatttcgccggtttcacggtcgtaaatacgggtgctctgaccaatgtatacgcccatggaaatgacggaaccttcttcgacaatcaccccttcaaccacttcagagcgcgcgccgatgaagcaattatcttcaatgatggttgggttagcctgcagcggttccagcacgccgccgatgcccacgccaccggaaaggtggacgtttttaccaatctgcgcacaagaaccgacggtcgcccaggtatcaaccatggtgccttcatcaacatatgcgccgatgttgacgtaagacggcatcagcacggtgttacgggcaataaacgcaccctgacgtaccgccgctggtggcacaacgcggaagccttctttctggaaacgtgcttcgtcgtagtcggcgaatttcatcggcactttgtcgaagtagcggctttctgccccttcgatcacctgattatcattaatacggaaagagagcagcaccgcttttttcaaccactgatgcgtcacccactgaccgtcaattttttccgctacacgcagtgcgccggaatccagcagggcgatcacctgatttaccgcttcgcgggtaacggtgtctgcattggctggcgtgatctcggcacggcgttcaaaagcggtttcaataatgttctgtaactgctgcattgttaaactcttttcatatcagtaaacacatcaccctttatcgtttggattgagggcctctgtcaaccgctgatgcacttcctgctgcaactcgttattaagcgcacgccggtcagcggtggcaattatgaataaatcttctactcgctcgccaatggttgtaattcgggcaccatgaaggctaattcccagatcggcaaaaattttcccgactcgcgccagcagtccaggttggtcgagggcgatcagttcgaggaagcttttgcggtcggtatgggtcggcaaaaacgttacttcggtttcaacagtaaaatggcgtaatttggcgggttggcgacggggctgcggtggctgccagctactttgcgtcagtacttgctccagaccaaaccgaataacctcatgacgatctgcggacagcgggttgccatcgggttccagcacgataaaggtatccatcgccataccgtcgcgagtggtgaaaatttgtgcgtcgtgaacacttaaattgcggcggtctaattcggcacagacggcggcaaacagataagggcggtccgggctccagataaaaatctcggtgcctccacgcgtagcctgcgggctaagcaataccagcggtttgcttaaatcatgctgtaataaatggcgggcatgccaggccagttgatttgggctatggcggacaaaatagttagcacgacagcgactccaaatttggtgcagcgcctcttcgtcgatgttatccatgcgcagtagtgccagtgcctggagttggtgatggcgaacccgttcgcgcatatccggcgtgttttgcattccgcgtcgtagctgcttttcggtggcaaagtagagctcacgcaacagactttgcttccagctattccacagcgtttcgttggtggcgcaaatgtcagccacagtcaggcataccagatagcgcagacgattttccgtttgcacttcttcggcaaactgcttgatgacttccgggtcctgaatatcgcggcgttgggcggtcacgctcatcaacaggtgctggcgaaccagccaggcgaccagctgtgtttcgcgactgttcagcccgtggagttcggcaaaatgcactacatcctgagcaccgagaatggagtggtcgccgccgcgtcctttggcgatatcgtgaaacagcgcggcgatgaaaatcagctcagtactcggcaggcgcggccagacgtccacacacaacggatggcgctggcgcgtttcttcactggcaaaactctccagtttcagcatcacgcggatagtatgttcatccaccgtgtaggcgtggaacagatcaaactgcatctgcccgacgatatggctccattgcggcatatacgcgccgagcacgctatggcgatgcattggcaatagcccgcgccgcaccgctccggggtgacgcagaatgctcaaaaacagttttcgtgcttccggaatattacacagcggttgttgcagatggcgacgggcatggcgtaactggcgcagcgtggtggagtaaatgccggtgatcgcactgttgtgcaccatggtgtagaacatacgcaagatggcttccggctggcgcataaatagtgtttcatcacgcaggtcgattagcgtaccgcgtagctgaaactcatcgtcgattggacgtggtttttcgtcggcgggaagggcgaggatggcttcatcgaacagttgcagcagcatctggttgagttcactgacgcggcgtgtaacgcggaagtaatccttcatcatccgctcgaccggttcgttaccttcaccactgtaattcagacgctgggcgacgctaagctggcgatcgaataacaggcgattatcgtaacggctgacgaccagatgcagggcaaagcgaatacgccacaatatatgcagacattcgtttaattccgcccgctccgcactggttaagaagccaaacccgaccatttcatccaggcttgttgcgccaaaatgacggcgggccacccattgcagagtgtggatatcgcgcaagccgccagggctgcttttgatgtctggttcaaggttgtagctggtgccatggtaacgctgatggcgctggttctgttcttcaactttcgccgcgtagaacttgtcggaaggccagaatccttcgctgaaaatatgtttttgcagttcgaggaacagcgcaacatcgccaattaataagcgggattcgattaaattggtggcgacggttaaatcgcttaacccttccagcatgcactcttcaagcgtgcgcacgctatgaccgacttccagctttacatcccagagcagcgttaacagctcgcccactttttgcgcctgatcgtccgggagctttttacggcttaaaatcagtaaatcgacgtcactaagtggatgcagctcgccacgaccgtagccaccgacggcgaccaatgccaggtcggcaatctggctgaatcccgcttcaatccataatcgttgcaggagctggtcgataaactcggtgcgcgcctcaatcaactgttctgcagagatcccattgtcaaaggcatcacccagccaacgctggaaagtatcgatatgggcttttatcccaccgacggttaattcatcacggggccagacgcatggattttgcggttgaccgggcagggtggggagagcggtgtttgcgtactgttctggaagggtattcattgtgcgccacccataagattaaattatcgcattaaaaaagccggcattcgccggcttcatcttattcgtcgtggctgattatcgccgggatggtgtcatccttgcgtagcgtcagaatttcgcagccgttatcagtcaccacaatagtatgctcatattgtgcagacaagctgcgatctttggtttttaccgtccagccatctttcatggtgcggatctcttttttacccgcgttgaccattggctcgatggtgaacgtcatcccaggtttcagtacgacgttggtttcacgggagtcatagtgcagcacctgcggttcttcatggaagccgcgaccaataccgtgtccgcaatattcacgaacgacggagaagccttctgcttcgacaaatttctgaatcgccgcaccgatttcgcgcagattaatgcctggttttaccatgcgtagcgccaggtacaggctttcttgcgtgatgcggcacagacgttcgcccatgatggtcggcttaccgacgataaacattttgctggtatcgccgtggaaaccatctttgattacggtgacatcaatgttaacgatatcgccatctttcagcagcttagcatcgtccgggataccgtggcacaccacttcattaatagagatgcaaacggatttcggatagccgtgatagccgaggcaggcagaaaccgcgtgttgttcattaacaatgtaatcattacagatgcgatccagctcgccggtgctgacgcccggtttaacatacggttcgatcatctccagcacttcggcagccagtcggccagcgacgcgcattttttcgatatcttctggggtcttgatagagatagccattaattctgtccatcagcgtcggtgataccgacaatatatatgtaagtgccgtcaatggtatcacacccgggcaaattgagaatcattctgaatttcgccaaacgtgccactgaaggttttctataatagaaaattcgacgtctgatgctgtacacagcgccaacaattattggtgtccacgacgtatttgtggtataaagcgcgccggacttccgatccatttcgtatacacagactggacggaagcgacaatctcactttgtgtaacaacacacacgtatcggcacatattccggggtgccctttggggtcggtaatatgggatacgtggaggcataaccccaacttttatatagaggttttaatcatggcaactgtttccatgcgcgacatgctcaaggctggtgttcacttcggtcaccagacccgttactggaacccgaaaatgaagccgttcatcttcggtgcgcgtaacaaagttcacatcatcaaccttgagaaaactgtaccgatgttcaacgaagctctggctgaactgaacaagattgcttctcgcaaaggtaaaatccttttcgttggtactaaacgcgctgcaagcgaagcggtgaaagacgctgctctgagctgcgaccagttcttcgtgaaccatcgctggctgggcggtatgctgactaactggaaaaccgttcgtcagtccatcaaacgtctgaaagacctggaaactcagtctcaggacggtactttcgacaagctgaccaagaaagaagcgctgatgcgcactcgtgagctggagaaactggaaaacagcctgggcggtatcaaagacatgggcggtctgccggacgctctgtttgtaatcgatgctgaccacgaacacattgctatcaaagaagcaaacaacctgggtattccggtatttgctatcgttgataccaactctgatccggacggtgttgacttcgttatcccgggtaacgacgacgcaatccgtgctgtgaccctgtacctgggcgctgttgctgcaaccgtacgtgaaggccgttctcaggatctggcttcccaggcggaagaaagcttcgtagaagctgagtaataaggcttgataactcccccaaaatagttcgagttgcagaaaggcggcaagctcgagaattcccgggagcttacatcagtaagtgaccgggatgagcgagcgaagataacgcatctgcggcgcgaaatatgaagggggagagcccttatagaccaggtagtacacgtttggttagggggcctgcatatggccccctttttcacttttatatctgtgcggtttaatgccgggcagatcacatctccgaggattttagaatggctgaaattaccgcatccctggtaaaagagctgcgtgagcgtactggcgcaggcatgatggattgcaaaaaagcactgactgaagctaacggcgacatcgagctggcaatcgaaaacatgcgtaagtccggtgctattaaagcagcgaaaaaagcaggcaacgttgctgctgacggcgtgatcaaaaccaaaatcgacggcaactacggcatcattctggaagttaactgccagactgacttcgttgcaaaagacgctggtttccaggcgttcgcagacaaagttctggacgcagctgttgctggcaaaatcactgacgttgaagttctgaaagcacagttcgaagaagaacgtgttgcgctggtagcgaaaattggtgaaaacatcaacattcgccgcgttgctgcgctggaaggcgacgttctgggttcttatcagcacggtgcgcgtatcggcgttctggttgctgctaaaggcgctgacgaagagctggttaaacacatcgctatgcacgttgctgcaagcaagccagaattcatcaaaccggaagacgtatccgctgaagtggtagaaaaagaataccaggtacagctggatatcgcgatgcagtctggtaagccgaaagaaatcgcagagaaaatggttgaaggccgcatgaagaaattcaccggcgaagtttctctgaccggtcagccgttcgttatggaaccaagcaaaactgttggtcagctgctgaaagagcataacgctgaagtgactggcttcatccgcttcgaagtgggtgaaggcatcgagaaagttgagactgactttgcagcagaagttgctgcgatgtccaagcagtcttaattatcaaaaaggagccgcctgagggcggcttctttttgtgcccatcttgtaaattcagctaacccttgtggggctgcgctgaaaagcgacgtacaatgtcgctagtattaattcatttcaatcgttgacagtctcaggaaagaaacatggctaccaatgcaaaacccgtctataaacgcattctgcttaagttgagtggcgaagctctgcagggcactgaaggcttcggtattgatgcaagcatactggatcgtatggctcaggaaatcaaagaactggttgaactgggtattcaggttggtgtggtgattggtgggggtaacctgttccgtggcgctggtctggcgaaagcgggtatgaaccgcgttgtgggcgaccacatggggatgctggcgaccgtaatgaacggcctggcaatgcgtgatgcactgcaccgcgcctatgtgaacgctcgtctgatgtccgctattccattgaatggcgtgtgcgacagctacagctgggcagaagctatcagcctgttgcgcaacaaccgtgtggtgatcctctccgccggtacaggtaacccgttctttaccaccgacagtgcagcttgcctgcgtggtatcgaaattgaagccgatgtggtgctgaaagcaaccaaagttgacggcgtgtttaccgctgatccggcgaaagatccaaccgcaaccatgtacgagcaactgacttacagcgaagtgctggaaaaagagctgaaagtcatggacctggcggccttcacgctggctcgtgaccataaattaccgattcgtgttttcaatatgaacaaaccgggtgcgctgcgccgtgtggtaatgggtgaaaaagaagggactttaatcacggaataattcccgtgatggataaataagggtaagattccgcgtaagtatcgcgggggcgtaagtctggttataaggcgttattgttgcaggcagtttggtcacggccagcgcgcagcaaccggagcgtacaaaagtacgtgaggatggcgagcactgcccggggccaaaatggcaaataaaatagcctaataatccagacgattacccgtaatatgtttaatcagggctatacttagcacacttccactgtgtgtgactgtctggtctgactgagacaagttttcaaggattcgtaacgtgattagcgatatcagaaaagatgctgaagtacgcatggacaaatgcgtagaagcgttcaaaacccaaatcagcaaaatacgcacgggtcgtgcttctcccagcctgctggatggcattgtcgtggaatattacggcacgccgacgccgctgcgtcagctggcaagcgtaacggtagaagattcccgtacactgaaaatcaacgtgtttgatcgtagtatgtctccggccgttgaaaaagcgattatgacgtccgatcttggcctgaacccgaactctgcgggtagcgacatccgtgttccgctgccgccgctgacggaagaacgtcgtaaagatctgaccaaaatcgttcgtggtgaagcagaacaagcgcgtgttgcagtacgtaacgtgcgtcgtgacgcgaacgacaaagtgaaagcactgttgaaagataaagagatcagcgaagacgacgatcgccgttctcaggacgatgtacagaaactgactgatgctgcaatcaagaaaattgaagcggcgctggcagacaaagaagcagaactgatgcagttctgatttcttgaacgacaaaaacgccgctcagtagatccttgcggatcggctggcggcgttttgctttttattctgtctcaactctggatgtttcatgaagcaactcaccattctgggcagcaccggcagcattggttgcagcacgctggacgtggtgcgccataatcccgaacacttccgcgtagttgcgctggtggcaggcaaaaatgtcactcgcatggtagaacagtgcctggaattctctccccgctatgccgtaatggacgatgaagcgagtgcgaaacttcttaaaacgatgctacagcaacagggtagccgcaccgaagtcttaagtgggcaacaagccgcttgcgatatggcagcgcttgaggatgttgatcaggtgatggcagccattgttggcgctgctgggctgttacctacgcttgctgcgatccgcgcgggtaaaaccattttgctggccaataaagaaagtctggttacctgcggacgtctgtttatggacgccgtaaagcagagcaaagcgcaattgttaccggtcgatagcgaacataacgccatttttcagagtttaccgcaacctatccagcataatctgggatacgctgaccttgagcaaaatggcgtggtgtccattttacttaccgggtctggtggccctttccgtgagacgccattgcgcgatttggcaacaatgacgccggatcaagcctgccgtcatccgaactggagcatggggcgtaaaatttctgtcgatagcgctaccatgatgaacaaaggtctggaatacattgaagcgcgttggctgtttaacgccagcgccagccagatggaagtgctgattcacccgcagagtgtgattcacagtatggtgcgctatcaggacggcagtgttctggcgcagctgggggaaccggatatgcgtacgccaattgcccacaccatggcatggccgaatcgcgtgaactctggcgtgaagccgctcgatttttgcaaactaagtgcgttgacatttgccgcaccggattatgatcgttatccatgcctgaaactggcgatggaggcgttcgaacaaggccaggcagcgacgacagcattgaatgccgcaaacgaaatcaccgttgctgcttttcttgcgcaacaaatccgctttacggatatcgctgcgttgaatttatccgtactggaaaaaatggatatgcgcgaaccacaatgtgtggacgatgtgttatctgttgatgcgaacgcgcgtgaagtcgccagaaaagaggtgatgcgtctcgcaagctgaggataatccggctacagagagtcgcgctatttgttagcgtagggcttcagtgatatagtctgcgccatctgatcgtaagtagttggctttataaggtcagatatgccgtggttttacacggcttttttttgtataggcttcagtattcctgagtaccgtaaaccctgtcagggaataaaaaacgcgtgatgttgtctgctactcaaccacttagcgaaaaattgccagcgcatggctgccgtcatgttgcgatcattatggacggcaatggccgctgggcaaaaaagcaagggaagattcgtgcctttgggcataaagccggggcaaaatccgtccgccgggctgtctcttttgcggccaacaacggtattgaggcgttaacgctgtatgcctttagtagtgaaaactggaaccgaccagcgcaggaagtcagtgcgttaatggaactgtttgtgtgggcgctcgatagcgaagtaaaaagtctgcaccgacataacgtgcgtctgcgtattattggcgataccagtcgctttaacagccgtttgcaagaacgtattcgtaaatctgaagcgctaacagccgggaataccggtctgacgctgaatattgcggcgaactacggtggacgttgggatatagtccagggagtcaggcaactggctgaaaaggtgcagcaaggaaacctgcaaccagatcagatagatgaagagatgctaaaccagcatgtctgtatgcatgaactggcccctgtagatttagtaattaggactgggggggagcatcgcattagtaactttttgctttggcaaattgcctatgccgaactttactttacagatgttctctggcccgatttcgatgaacaagactttgaaggggcgttaaatgcctttgctaatcgagagcgtcgtttcggcggcaccgagcccggtgatgaaacagcctgatgggggtcgcttttgctgaagtatcgcctgatatctgcttttgtgttaatacccgtcgtcatcgcggcgttgtttctgttgccgccggtggggttcgccattgtaacgctggtggtctgcatgctggcagcgtgggaatggggacagcttagcggttttaccactcgtagccagcgagtatggttggcggtgttatgcgggttattgttggcgctgatgctttttctgttgccggaatatcaccgaaatattcatcaaccgctggttgaaatcagtctttgggctagcctgggttggtggattgtcgcgctattgctggtgctgttttacccaggttccgcagcaatctggcgtaactctaaaacattgcgccttatttttggcgtgctaaccattgttcccttcttctggggcatgctggcgttacgggcctggcactatgacgagaatcattacagtggcgcaatatggttgctctatgtcatgatcctggtatggggcgctgactccggcgcatatatgtttggcaaattgtttggtaaacataagctggcaccgaaggtttctccgggtaaaacctggcaaggctttatcggtggactcgctactgcagcggtaatcagttggggttatggcatgtgggcgaatctcgacgtcgctcccgtcaccttactcatttgctctattgtcgcagcgttagccagtgtgctcggcgatctgaccgagagtatgtttaagcgtgaagcaggaattaaggacagcggtcatttaattccaggacacggtggtattttagatcgtattgatagcctgacggctgcggtaccggtctttgcttgcttgttgttactggtattcaggacgctttaacggaaggtaatatgctgagttttctctgggatttggctagcttcatcgttgcactgggtgtacttatcaccgtgcatgaatttggtcatttctgggttgcccggcgttgtggtgttcgcgttgagcgtttcagtatagggtttggtaaggcgctctggcggcgaactgataagctcggcaccgaatatgttatcgccctgatcccgttgggcggttatgtcaaaatgctggatgagcgcgcagaaccggtcgttccggaactccgccaccatgccttcaataataaatctgtcggccaacgagcggcgattattgccgcaggtccggttgcaaacttcatttttgctatctttgcctactggctggtttttattattggtgtgcctggcgtacgtccggtggttggcgaaatagcagccaatagcatagctgcggaagcacaaattgcaccaggtacggaactaaaagccgtagatggtatcgaaacgcctgattgggatgccgtgcgtttgcagttggtcgataaaattggcgatgaaagcaccaccattacagtagcgccatttggcagcgaccaacggcgggatgtaaagctcgatttacgtcactgggcgtttgagcctgataaagaagatccggtatctagcctggggattcgtcctcgtgggccgcaaattgaacctgtactggaaaatgtgcagccaaacagcgcggcaagcaaggcaggtttgcaagcaggcgacaggatcgttaaagtcgatggtcagcccttaacgcagtgggtgacctttgtgatgcttgtccgggataacccgggtaaatccttagcgttagaaatcgaaaggcaggggagtcccttgtctttgacattaatcccggagagtaaaccgggtaatggtaaagcgattggttttgtcggtattgagccgaaagtcattcctttgccagatgagtataaagttgtacgccagtatgggccgttcaacgccatcgtcgaagccacggacaaaacgtggcagctgatgaagctgacggtcagtatgctgggaaaattgatcaccggtgatgtgaaactgaacaacctcagtgggccgatctctatcgccaagggggctgggatgacagcggaactcggggttgtttattacctgccgtttcttgcgcttattagcgtgaacttagggataattaacctgtttccgttgcccgtacttgacggggggcatctgctgttccttgcgatcgaaaagatcaagggcggaccggtatccgagcgggttcaagacttttgttatcgcattggcagcattctgctggtgctgttaatggggcttgcacttttcaatgatttctctcggttatgagagttagttaggaagaacgcataataacgatggcgatgaaaaagttgctcatagcgagcctgctgtttagcagcgccaccgtatacggtgctgaagggttcgtagtgaaagatattcatttcgaaggccttcagcgtgtcgccgttggtgcggccctcctcagtatgccggtgcgcacaggcgacacggttaatgatgaagatatcagtaataccattcgcgctctgtttgctaccggcaactttgaggatgttcgcgtccttcgtgatggtgatacccttctggttcaggtaaaagaacgtccgaccattgccagcattactttctccggtaacaaaagcgtgaaagatgacatgctgaagcaaaacctcgaggcttctggtgtgcgtgtgggcgaatccctcgatcgcaccaccattgccgatatcgagaaaggtctggaagacttctactacagcgtcggtaaatatagcgccagcgtaaaagctgtcgtgaccccgctgccgcgcaaccgtgttgacctaaaactggtgttccaggaaggtgtgagtgctgaaatccagcaaattaacattgttggtaaccatgctttcaccaccgacgaactgatctctcatttccaactgcgtgacgaagtgccgtggtggaacgtggtaggcgatcgtaaataccagaaacagaaactggcgggcgaccttgaaaccctgcgcagctactatctggatcgcggttatgcccgtttcaacatcgactctacccaggtcagtctgacgccagataaaaaaggtatttacgtcacggtgaacatcaccgaaggcgatcagtacaagctttctggcgttgaagtgagcggcaaccttgccgggcactccgctgaaattgagcagctgactaagatcgagccgggtgagctgtataacggcaccaaagtgaccaagatggaagatgacatcaaaaagcttctcggtcgctatggttatgcctatccgcgcgtacagagcatgcccgaaattaacgatgccgacaaaaccgttaaattacgtgtgaacgttgatgcgggtaaccgtttctacgtgcgtaagatccgttttgaaggtaacgataccagcaaagatgccgtcctgcgtcgcgaaatgcgtcagatggaaggtgcatggctggggagcgatctggtcgatcagggtaaggagcgtctgaatcgtctgggcttctttgaaactgtcgataccgatacccaacgtgttccgggtagcccggaccaggttgatgtcgtctacaaggtaaaagagcgcaacaccggtagcttcaactttggtattggttacggtactgaaagtggcgtgagcttccaggctggtgtgcagcaggataactggttaggtacaggttatgctgttggtatcaacgggaccaaaaacgattaccagacctatgctgaactgagcgtaaccaacccgtacttcaccgtagatggcgtaagcctcggtggtcgtctcttctataatgacttccaggcagatgacgccgacctgtccgactataccaacaagagttatggtacagacgtgacgttgggcttcccgattaacgaatataacagcctgcgtgcaggtctgggttatgtacataactccctgtccaacatgcagcctcaggttgcgatgtggcgttatctgtactctatgggtgaacatccgagcacctctgatcaggataacagcttcaaaacggacgacttcacgttcaactatggttggacctataacaagcttgaccgtggttacttcccgacagatggtagtcgtgtcaacctgaccggtaaagtgaccattcctggaagcgataacgaatactacaaagtgacgttagacacggcgacttatgtgccgatcgatgacgatcacaaatgggttgttctggggcgtacccgctggggttatggtgatggtttaggcggcaaagagatgccgttctacgagaacttctatgccggtggttccagcaccgtgcgtggcttccagtccaataccattggtccgaaagcagtttacttcccgcatcaggccagtaattatgatccggactatgattacgaatgtgcgactcaggacggcgcgaaagacctgtgtaaaagcgatgatgctgtaggcggtaacgccatggcggttgccagcctcgagttcatcaccccgacgccgtttattagcgataagtatgctaacagcgttcgtacttccttcttctgggatatgggtaccgtttgggatacaaactgggattccagccaatattctggatatccggactatagtgatccaagcaatatccgtatgtctgcgggtatcgcattacaatggatgtccccattggggccgttggtgttctcctacgcccagccgttcaaaaagtacgatggagacaaggcagaacagttccagtttaacatcggtaaaacctggtaagtgttctccacaaaggaatgtagtggtagtgtagcgatgactttaggcgatcaatataagatcgccgggccacgcaaagaactgcaccctccggtgcaaatgggatggtaaggagtttattgtgaaaaagtggttattagctgcaggtctcggtttagcactggcaacttctgctcaggcggctgacaaaattgcaatcgtcaacatgggcagcctgttccagcaggtagcgcagaaaaccggtgtttctaacacgctggaaaatgagttcaaaggccgtgccagcgaactgcagcgtatggaaaccgatctgcaggctaaaatgaaaaagctgcagtccatgaaagcgggcagcgatcgcactaagctggaaaaagacgtgatggctcagcgccagacttttgctcagaaagcgcaggcttttgagcaggatcgcgcacgtcgttccaacgaagaacgcggcaaactggttactcgtatccagactgctgtgaaatccgttgccaacagccaggatatcgatctggttgttgatgcaaacgccgttgcttacaacagcagcgatgtaaaagacatcactgccgacgtactgaaacaggttaaataagtaatgcctagtattcgactggctgatttagcgcagcagttggatgcagaactacacggtgatggcgatatcgtcatcaccggcgttgcgtccatgcaatctgcacaaacaggtcacattacgttcatggttaacccaaaataccgtgagcatttaggcttgtgccaggcgtccgcggttgtcatgacccaggacgatcttcctttcgcgaaaagtgccgcactggtagtgaagaatccctacctgacttacgcgcgcatggcgcaaattttagataccacgccgcagcccgcgcagaacattgcacccagtgcggtgatcgacgcgacggcgaagctgggtaacaacgtaagcattggcgctaacgcggtgattgagtccggcgttgaactgggcgataacgtgattatcggtgccggttgcttcgtaggtaaaaacagcaaaatcggtgcaggtagccgtctctgggcgaacgtaaccatttaccatgagatccagatcggtcagaattgcctgatccagtccggaacagtggtaggcgcagacggctttggttatgccaacgatcgtggtaactgggtgaagatcccacagattggtcgcgtaattattggcgatcgcgtggagatcggtgcctgcacaaccatcgatcgcggcgcgctggatgacactattattggcaatggcgtgatcattgataaccagtgccagattgcacataacgtcgtgattggcgacaatacggcggttgccggtggcgtcattatggcgggcagcctgaaaattggtcgttactgcatgatcggcggagccagcgtaatcaacgggcatatggaaatatgcgacaaagtgacggttacgggcatgggtatggtgatgcgtcccatcactgaaccaggcgtctattccagtggcattccgctgcaacccaacaaagtctggcgcaaaaccgctgcactggtgatgaacattgatgacatgagcaagcgtctgaaaagccttgagcgcaaggttaatcaacaagactaacgttccatcttttgttcgccaaactttacggcctgtctcattcttacgattgcggcaggccgtgttattattgtcgtttcttatattttgacaggaagagtatcttgactactaacactcatactctgcagattgaagagattttagaacttctgccgcaccgtttcccgttcttactggtggatcgcgtgctggattttgaagaaggtcgttttctgcgcgcagtaaaaaatgtctctgtcaatgagccattcttccagggccatttccctggaaaaccgattttcccgggtgtgctgattctggaagcaatggcacaggcaacaggtattctggcgtttaaaagcgtaggaaaactggaaccgggtgagctgtactacttcgctggtattgacgaagcgcgcttcaagcgcccggtcgtgcctggcgatcaaatgatcatggaagtcactttcgaaaaaacgcgccgcggcctgacccgttttaaaggggttgctctggtcgatggtaaagtagtttgcgaagcaacgatgatgtgtgctcgtagccgggaggcctgatacgtgattgataaatccgcctttgtgcatccaaccgccattgtggaagagggcgcgagtattggcgcgaacgcacacattggtcctttttgtatcgttggaccccatgtcgaaattggtgagggtaccgtactgaaatctcacgttgtcgtgaatggtcatactaaaattggccgcgataatgagatttatcagttcgcctccatcggcgaagttaaccaggatctgaaatatgctggcgaaccgacccgtgtggaaatcggcgatcgtaaccgcattcgcgaaagcgtcaccattcatcgtggcacagtccagggcggtggattgacgaaggtgggcagcgacaacttactgatgatcaacgcgcacattgcgcacgattgtacggtaggtaaccgctgtattctcgccaacaacgcaacgctggcgggtcacgtaagcgttgacgacttcgcgatcatcggcggcatgaccgcagtccatcagttctgcatcattggtgcgcacgtgatggttggcggctgctccggtgtggcgcaggacgtccctccttatgtcattgcgcagggtaaccacgcaacgccgttcggtgtcaatatcgaagggctgaagcgccgcggattcagccgtgaggcgattaccgctatccgcaatgcgtataagctgatttatcgtagcggtaaaacgctcgatgaagtgaaaccggaaattgctgaactggcggaaacatatccggaagtgaaagcctttaccgatttctttgcacgcagtacgcgcggtctgattcgttaatgactgaacagcgtccattaacgattgccctggtcgccggagaaacctccggcgatatcctgggggccggtttaatccgcgctctgaaagaacatgtgcccaacgcccgctttgttggtgttgccgggccacgaatgcaggctgaaggctgcgaagcctggtacgaaatggaagaactggcggtgatgggcattgttgaagtgctcggtcgtctgcgtcgcttactgcatattcgtgccgatctgacaaagcgttttggcgaactgaagccagatgtttttgttggtattgatgcgcctgacttcaatattactcttgaaggtaacctcaaaaagcagggtatcaaaaccattcattacgtcagtccgagtgtctgggcgtggcgacagaaacgtgttttcaaaataggcagagccaccgatctggtgctcgcatttctgcctttcgaaaaagcgttttatgacaaatacaacgtaccgtgccgctttatcggtcataccatggctgatgccatgccattagatccagataaaaatgccgcccgtgatgtgctggggatccctcacgatgcccactgcctggcgttgctaccggggagccgtggtgcagaagttgaaatgcttagtgccgatttcctgaaaacggcccagcttttgcgccagacatatccggatctcgaaatcgtggtgccactggtgaatgccaaacgccgcgagcagtttgaacgcatcaaagctgaagtcgcgccagaccttagtgttcatttgctggatgggatgggccgtgaggcgatggtcgccagcgatgcggcgctactggcgagcggtacggcagccctggagtgtatgctggcgaaatgcccgatggtggtgggatatcgcatgaagccttttaccttctggttggcgaagcggctggtgaaaactgattatgtcagcctgccaaatctgctggcgggcagagagttagtcaaagaattattgcaggaagagtgtgagccgcaaaaactggctgcggcgctgttaccgctgttggcgaacgggaaaaccagccacgcgatgcacgataccttccgtgaactgcatcagcagatccgctgcaatgccgatgagcaggcggcacaagccgttctggagttagcacaatgatcgaatttgtttatccgcacacgcagctggttgcgggtgtggatgaagtcggacgcgggccgttagttggcgcggtcgtcaccgctgcggtgatccttgacccggcgcgcccgattgccgggctgaatgattccaaaaagctgagcgaaaaacgccgtctggcgctctatgaagagatcaaagagaaagcgttgagctggagtctgggccgcgcggaaccccacgaaatcgacgagctgaacattcttcatgcgaccatgctggcgatgcagcgtgccgtcgctgggctgcatattgcgccggaatatgtgttgattgatggtaaccgctgcccgaaattaccgatgcctgcgatggctgtggtgaaaggcgatagccgcgtaccggaaatcagtgccgcgtctatcctggcgaaagtgacgcgtgacgccgaaatggcggcgctggatattgttttcccgcaatatggttttgcccaacacaaagggtacccaaccgcttttcatctggaaaaactggctgaacacggcgcgaccgaacaccatcggcgcagctttgggcctgtcaaacgcgcactgggacttgcgtcctgattcttgtgtcgagattaagtaaaccggaatctgaagatgtctgaaccacgtttcgtacacctgcgggtgcacagcgactacagcatgatcgatggcctggccaaaaccgcaccgttggtaaaaaaggcggcggcgttgggtatgccagcactggcgatcaccgatttcaccaacctttgtggtctggtgaagttctacggagcgggacatggcgcagggattaagcctatcgtcggggcagattttaacgtccagtgcgacctgctgggtgatgagttaacccacctgacggtactggcggcgaacaataccggctatcagaatctgacgttgctgatcagtaaagcgtatcagcgcgggtacggtgccgccgggccgatcatcgatcgcgactggcttatcgaattaaacgaagggttgatccttctttccggcggacgcatgggcgacgtcggacgcagtcttttgcgtggtaacagcgcgctggtagatgagtgtgtcgcgttttatgaagaacacttcccggatcgctattttctcgagctgatccgcaccggcaggccggatgaagaaagctatctgcacgcggcggtggaactggcggaagcgcgcggtttgcccgtcgtggcgaccaacgacgtgcgctttatcgacagcagcgactttgacgcacacgaaatccgcgtcgcgatccacgacggctttaccctcgacgatcctaaacgcccgcgtaactatagcccgcagcaatatatgcgtagcgaagaggagatgtgtgagctgtttgccgacatccccgaagcccttgccaacaccgttgagatcgccaaacgctgtaacgtaaccgtgcgtcttggtgaatacttcctgccgcagttcccgaccggggacatgagcaccgaagattatctggtcaagcgtgcaaaagagggcctggaagagcgtctggcctttttattccctgatgaggaagaacgtcttaagcgccgcccggaatatgacgaacgtctggagactgaacttcaggttatcaaccagatgggcttcccgggctacttcctcatcgttatggaatttatccagtggagcaaagataacggcgtaccggtagggccaggccgtggctccggtgcgggtagtctggtggcctacgcgctgaaaatcaccgacctcgatccgctggaatttgacctgctgttcgaacgtttccttaacccggaacgtgtctccatgcctgacttcgacgttgacttctgtatggagaaacgcgatcaggttatcgagcacgtagcggacatgtacggtcgtgatgcggtaagccagatcatcaccttcggtacaatggcggcgaaagcggtgatccgcgacgtaggccgcgtgctggggcatccgtacggctttgtcgatcgtatcagcaaactgatcccgcccgatccggggatgacgctggcgaaagcgtttgaagccgagccgcagctgccggaaatctacgaagcggatgaagaagttaaggcgctgatcgacatggcgcgcaaactggaaggggtcacccgtaacgccggtaagcacgccggtggggtggttatcgcgccgaccaaaattaccgattttgcgccgctttactgcgatgaagagggcaaacatccggtcacccagtttgataaaagcgacgttgaatacgccggactggtgaagttcgacttccttggtttgcgtacgctcaccatcatcaactgggcgctggagatgatcaacaagcggcgggcgaagaatggcgagccgccgctggatatcgctgcgatcccgctggatgataagaaaagcttcgacatgctgcaacgcagcgaaaccacggcggtattccagcttgaaagccgcggcatgaaggacctgatcaagcgtctacaacctgactgcttcgaagatatgatcgccctagtggcactgttccgccccggtccgttgcaaagtgggatggtggataactttatcgaccgtaaacatggtcgtgaagagatctcctatccggacgtacagtggcagcatgaaagcctgaaaccggtactggagccaacctacggcattatcctgtatcaggaacaggtcatgcagattgcgcaggtgctttctggttataccctcggtggcgcggatatgctgcgtcgtgcgatgggtaagaaaaagccggaagagatggctaagcaacgttctgtatttgctgaaggtgcagaaaagaacggaatcaacgctgaactggcgatgaaaatcttcgacctggtggagaaattcgctggttacggatttaacaaaagccactctgcggcctatgctttggtgagttatcaagcgttatggctgaaagcgcactatcctgcggagtttatggcggcggtaatgaccgccgatatggacaacaccgagaaggtggtgggtctggtggatgagtgctggcggatggggctgaaaatcctgccaccagatataaactccggtctttaccatttccacgtcaacgacgacggcgaaatcgtgtatggtattggcgcgatcaaaggggtcggtgaaggtccgattgaggccatcatcgaagcccgtaataaaggcggctacttccgcgaactgtttgatctctgcgcccgtaccgacaccaaaaagttgaaccgtcgcgtgctggaaaaactgatcatgtccggggcgtttgaccgtcttgggccacatcgcgcagcgctgatgaacagcctgggcgatgcgttaaaagcggcagatcaacacgcgaaagcggaagctatcggtcaggccgatatgttcggcgtgctggccgaagagccggaacaaattgaacaatcctacgccagctgccaaccgtggccggagcaggtggtattagatggggaacgtgaaacgttaggcctgtacctgaccggacaccctatcaaccagtatttaaaagagattgagcgttatgtcggaggcgtaaggctgaaagacatgcacccgacagaacgtggtaaagtcatcacggctgcggggctcgttgttgccgcgcgggttatggtcaccaagcgcggcaatcgtatcggtatctgcacgctggatgaccgttccgggcggctggaagtgatgttgtttactgacgccctggataaataccagcaattgctggaaaaagaccgcatacttatcgtcagcggacaggtcagctttgatgacttcagcggtgggcttaaaatgaccgctcgcgaagtgatggatattgacgaagcccgggaaaaatatgctcgcgggcttgctatcagcctgacggacaggcaaattgatgaccagcttttaaaccgactccgtcagtctctggaaccccaccgctctgggacaattccagtacatctctactatcagagggcggatgcacgcgcgcggttgcgttttggcgcgacgtggcgtgtctctccgagcgatcgtttattaaacgatctccgtggcctcattggtagcgagcaggtggaactggagtttgactaatacaggaatactatgagtctgaatttccttgattttgaacagccgattgcagagctggaagcgaaaatcgattctctgactgcggttagccgtcaggatgagaaactggatattaacatcgatgaagaagtgcatcgtctgcgtgaaaaaagcgtagaactgacacgtaaaatcttcgccgatctcggtgcatggcagattgcgcaactggcacgccatccacagcgtccttataccctggattacgttcgcctggcatttgatgaatttgacgaactggctggcgaccgcgcgtatgcagacgataaagctatcgtcggtggtatcgcccgtctcgatggtcgtccggtgatgatcattggtcatcaaaaaggtcgtgaaaccaaagaaaaaattcgccgtaactttggtatgccagcgccagaaggttaccgcaaagcactgcgtctgatgcaaatggctgaacgctttaagatgcctatcatcacctttatcgacaccccgggggcttatcctggcgtgggcgcagaagagcgtggtcagtctgaagccattgcacgcaacctgcgtgaaatgtctcgcctcggcgtaccggtagtttgtacggttatcggtgaaggtggttctggcggtgcgctggcgattggcgtgggcgataaagtgaatatgctgcaatacagcacctattccgttatcagcccggaaggttgtgcgtccattctgtggaagagcgccgacaaagcgccgctggcggctgaagcgatgggtatcattgctccgcgtctgaaagaactgaaactgatcgactccatcatcccggaaccactgggtggtgctcaccgtaacccggaagcgatggcggcaagcttgaaagcgcaactgctggcggatctggccgatctcgacgtgttaagcactgaagatttaaaaaatcgtcgttatcagcgcctgatgagctacggttacgcgtaattcgcaaaagttctgaaaaagggtcacttcggtggcccttttttatcgccacggtttgagcaggctatgattaaggaaggattttccaggaggaacacatgaacatcattgccattatgggaccgcatggcgtcttttataaagatgagcccatcaaagaactggagagcgcgctggtggcgcaaggctttcagattatctggccacaaaacagcgttgatttgctgaaatttatcgagcataaccctcgaatttgcggcgtgatttttgactgggatgagtacagtctcgatttatgtagcgatatcaatcagcttaatgaatatctcccgctttatgccttcatcaacacccacagcacgatggatgtcagcgtgcaggatatgcggatggcgctctggttttttgaatatgcgctggggcaggcggaagatatcgccattcgtatgcgtcagtacaccgacgaatatcttgataacattacaccgccgttcacgaaagccttgtttacctacgtcaaagagcggaagtacaccttttgtacgccggggcatatgggcggcaccgcatatcaaaaaagcccggttggctgtctgttttatgatttttcggcgggaatactcttaaggctgatgtctctattagcgtcaccgagcttggtagcttgctcgaccacaccgggccacacctggaagcggaagagtacatcgcgcggacttttggcgcggaacagagttatatcgttaccaacggaacaagcacgagcaacaaaattgtgggtatgtacgccgcgccatccggcagtacgctgttgatcgaccgcaattgtcataaaagcctggcgcatctgttgatgatgaacgatgtagtgccagtctggctgaaaccgacgcgtaatgcgttggggattcttggtgggatcccgcgccgtgaatttactcgcgacagcatcgaagagaaagtcgctgctaccacgcaagcacaatggccggttcatgcggtgatcaccaactccacctatgatggcttgctctacaacaccgactggatcaaacagacgctggatgtcccgagcattcacttcgattctgcctgggtgccgtacacccattttcatccgatctaccagggtaaaagtggtatgagcggcgagcgtgttgcgggaaaagtgatcttcgaaacgcaaagcacccacaaaatgctggcggcgttaagccaggctagcctgatccacattaaaggcgagtatgacgaagaggcctttaacgaagcctttatgatgcataccaccaccagccccagttatcccattgttgctagcgttgagacggcggcggcgatgctgcgtggtaatccgggcaaacggctgattaaccgtagtgtagaacgagctctgcattttcgcaaagaggtccagcggctgcgggaagagtctgacggttggtttttcgatatctggcaaccgccgcaggtggatgaagccgaatgctggcccgttgcgcctggcgaacagtggcacggctttaacgatgcggatgccgatcatatgtttctcgatccggttaaagtcactattttgacaccggggatggacgagcagggcaatatgagcgaggaggggatcccggcggcgctggtagcaaaattcctcgacgaacgtgggatcgtagtagagaaaaccggcccttataacctgctgtttctctttagtattggcatcgataaaaccaaagcaatgggattattgcgtgggttgacggaattcaaacgctcttacgatctcaacctgcggatcaaaaatatgctacccgatctctatgcagaagatcccgatttctaccgcaatatgcgtattcaggatctggcacaagggatccataagctgattcgtaaacacgatcttcccggtttgatgttgcgggcattcgatactttgccggagatgatcatgacgccacatcaggcatggcaacgacaaattaaaggcgaagtagaaaccattgcgctggaacaactggtcggtagagtaagcgcaaatatgatcctgccttatccaccgggcgtaccgctgttgatgcctggagaaatgctgaccaaagagagccgcacagtactcgattttctactgatgctttgttccgtcgggcaacattaccccggttttgaaacggatattcacggcgcgaaacaggacgaagacggcgtttaccgcgtacgagtcctaaaaatggcgggataacttgccagagcggcttccgggcgagtaacgtgctgttaacaaataaaggagacgttatgctgggtttaaaacaggttcaccatattgcgattattgcgacggattatgcggtgagcaaagctttctactgcgatattcttggtttcacgctgcaaagcgaagtctatcgcgaagcgcgcgacagttggaaaggggatttggcgcttaatgggcaatatgtgattgagcttttcagttttccgttcccgccggaacgacccagccgaccggaagcttgcggtctgcgtcatctggcttttagcgttgatgacatcgatgcggcagtggcgcaccttgaaagccataacgtgaagtgtgaaaccatccgtgtcgatccatacacgcaaaaacgcttcaccttctttaacgatccggacgggctgccgttggaactgtatgagcagtaaggcttgtcatcgccgcatttgcccggtaacgtgccgggcattgctactgtaaaatcgcaccatcatgacactcacgctcaatagacaacttctcaccagtcgccagattctggtggcctttagcggcgggcttgactccaccgttctgctgcatcagttggtgcagtggcggacggaaaatccgggtgtcgctctgcgcgctattcatgtgcatcacggtttaagtgccaatgccgatgcctgggttacgcattgcgaaaacgtctgccaacagtggcaggtgccgctggtggtcgaacgcgtacaacttgcgcaagaaggactgggcattgaggcccaggcgcggcaggcacgttatcaggcatttgcccgcaccttgttgcccggtgaagtgctggtcaccgcgcaacatctcgacgatcaatgtgaaacctttctgctggcgctaaaacgcggcagtggccctgccgggcttagcgctatggcggaagtcagcgagtttgccggaacgcggcttattcgcccgttgctcgcccgcacgcggggggaactggtgcagtgggcgcgtcagtatgatttacgctggattgaagacgaaagtaatcaggacgacagttacgatcgtaactttctgcgcctgcgcgtagtgccgttattgcagcagcgttggccgcattttgccgaagcaacggcccgcagcgccgcactttgtgctgaacaagagagcctgctggatgaactgctggcagatgatttagcacactgtcaaagcccgcaggggacgctgcagattgtgccaatgctggcgatgagtgatgcccgccgcgcggcgattatccgccgctggctggcagggcagaatgcaccgatgccttcccgcgacgcgttggtgaggatctggcaggaagtggcgctggcgcgggaagatgccagtccctgtttacgtttgggcgcgtttgaaatccgacgctatcagagccaactgtggtggattaaatccgtcaccgggcaaagcgaaaacattgtgccgtggcagacgtggcttcaaccgctggaattaccggcggggctgggaagtgtacagcttaatgcgggaggcgatattcgccctccgcgtgcagacgaagcggtcagcgtgcgtttcaaagcgccaggattgctgcatattgtcgggcgtaacggcggacgtaagctaaagaaaatctggcaagagctgggcgtgccgccgtggctacgtgacaccacgccactgctgttttatggcgaaacgctgattgcggcggcaggggtatttgtgacgcaagaaggtgtggctgaaggtgagaatggcgtaagttttgtctggcagaaaacgcttagttaagtgaaagccggataagacgcatcaaacgtcgcatccggcgaaagtcaatcaggattcgcttaccaccaccgtaccgatttccgggtggctaaagctggtaattttatccagacgcagctcgcgggtttcgccagcggcctcgacgaccaggtactccacatttttgcgggagactaaatcactggcttttgcctgcaatttttcgccatctttcagctcaagtgtcagcattaaatgatgctggcaggcgagctcaagattatcgtaatcatcacaattgattggttgatacgtatcattcattgacataatcgctcaccagtaagtttgccgcagcgtatgctgctttttccctgacagcctcagaaagggcgtcgtcggcagccatttcattcagcactttcaaaacgcagcccagcgcgtccggaacgtatcctaagtctccgctggcgatttccgcgtaccgcttgcgtattaactcacaatatttttccacatgccctcctgtcagcactctgacttaaccgtggatgcaagtctaagcctacgaagataaactctgtttcgcaaggtgactataccacactcatttctgcaatatcagcgccgcaactgcacgtattccgttacaatggcctcctgattcgaaaggagttttcttatggcgcttaaagcgacaatttataaagcgacggttaatgtggccgatctcgaccgcaaccagtttctcgatgcctctctgacgctggcgcgccatcctagtgaaacccaggagcgtatgatgctgcgcttgctggcgtggctgaaatatgctgatgaacgtctgcaatttacccgtggtttgtgtgccgatgatgagccggaagcgtggctgcgtaacgatcacctgggcattgatttgtggattgagctggggctgccggatgagcggcggattaagaaagcctgcacccaggccgcagaagtggcgctgtttacctataatagtcgggcggcgcaaatctggtggcagcaaaatcagagcaaatgtgtgcagtttgccaatctttccgtctggtatctggacgatgaacaactggcgaaagtaagcgcctttgccgatcgtaccatgacgctgcaggcaacgattcaggatggcgtgatctggttaagcgatgataagaataatctggaagtgaacttaaccgcctggcaacaacctagttgaactaaaccgcctggcaacaaccttcatgattgtgatttcccgacatgttgctattcccgatggtgagcttgagatcaccgccattcgtgcgcagggcgcgggcgggcagcatgttaataagaccagtacggctattcatctgcgttttgacattcgggcgtccagcctgccagagtattacaaagagcgtctgctcgccgccagccatcatttgatcagcagtgatggcgtgattgtcattaaggcacaggaataccgcagtcaggaactgaaccgcgaagcagctctggcccggctggtggctatgattaaagaattaacaacagaaaaaaaagcccgacgacccacgcggcccacccgtgcaagcaaagagcgcaggctggcaagcaaagcacaaaaaagtagcgtgaaggcgatgcgcggcaaagtgcgcagcggtcgggaataaaaagaaggaatggatggtgaaaaaagcgatagtgacagcgatggctgtaatcagcctctttactctgatgggatgtaataatcgggccgaagtcgatacgctttctccggcgcaggctgccgaactgaaaccgatgccgcaaagttggcgcggcgtgctgccgtgtgccgattgcgaaggaatcgaaacctctctgttcctcgaaaaagacggaacatgggtgatgaatgagcgttatctcggtgctcgtgaagaaccttcctccttcgcttcctacggtacatgggcgcgaaccgctgacaagctggtattaaccgacagcaaaggtgaaaagagttattatcgggcgaaaggcgatgcgctggagatgctcgatcgtgaaggcaatccgattgaaagccagttcaactatacgctggaagcggcacaatccagtttacctatgacgccgatgaccctgcggggcatgtatttttatatggctgatgcggcgaccttcactgattgcgcgaccggaaaacgtttcatggtagcgaataacgcagagctggagcgtagctacctggctgcgcgcggtcacagtgaaaaaccggtgttactgagtgtagaaggtcactttacgcttgagggtaatccggataccggtgcgccgactaaagtattggcacccgatacggcagggaaattttaccccaaccaggattgcagtagtttggggcagtaacccgtcttgagacagaaacaaacgcaaaacaggccagaaggatatatttcaacattttgaatttgcacgttttttgtaggccggataaggcgtttacgccgcatccggcaatggtgctcaacgcctgatgcgacgctggcgcgtcttatcatgcctacgacccccctcataccttaaggcggataaggcatttactttatcaccgggtcaaaccaacaaagcgacccgccttgatataaatcccaggcttcaggtgcccaacatactgtaactgcgtttctggcttaaacgcagagacatcaccaatacgcatatgcatcagatcggcagggctaatccagccgctttgcgccagtgtaagtggatgcccggctttggcaaaggcatccgtgacaaattcgctacaaaaccagctctttttgtctccttcgcccacactgcttaactgcgctttcgccaggccgctgacgcactgttggcgaaaatcctcggagaacggattcagactgcacatctggcgagtcaccataaagggaataaattcgacaatgccgcgatagttataaccgctatctttgattttattggcaaacgcggtgatatctgtggcttgttgcggggtaagatccgggactcgtaagacgaaaagcttatcactatgcttcatcgcttttttaagggaaacgatctggacgccagcgcctgtcgcttctgcaacgttattatcacccagaaagattgcaacgtgactcacagaggaagtgctgaagacgcggattccaaaactggttaccccaaggctactggagaacagcaaatcgccgggtttgagatcaggtgccgttatttcttttatactttgttcggtgaaagagctttgatgctggaatttgacagcccatgtttttgcctcggcatctactgctgtggcacttgggtctggctggctgatatcaacggtacaagcgctaagtaaaagaaagctggggagaaacaggcggcagtacgcctttggtttatccattttatacaatccatgtaaaaaaagggccctgaaattcaggaccctttctggcatcagcctttaatctgtttcaccagatattcgacgatgtcaccagtcttaattaactgtttctcgccgttgcgacgatatttatattcgatatcgtcgttgtcgaggttacggtcgcccagcacaatagtgtgcggaataccgatcagttccatatcagcaaacatcacgcccggacgctctttgcggtcatccagcagcacttcgataccttgtgcacgcagttcgctgtacagtttctcagcaagctcttgtacgcggaaggatttgtgcatgttcatcggcagaatcgccacctggaacggcgcgatagcgtcaggccatacgatgcctcgttcgtcgtagttctgctcaatcgccgcagctaccacacgcgttaccccgataccgtagcaacccatcgtcaggatttggttgcggccatcttcaccctgtacggaggctttcagtgcttcggagtacttggtacccagctggaagatgtgaccaacttcgataccacgtttgatcagcagcctaccctggccatccgggcttggatcgccagccaccacgttacggatatctgcaacttccggggtagcgacatcgcgatcccagttgatgccgaagtagtgtttaccatcgatgttagcaccagcagcgaaatcactcatcgccgcaacggtacggtcaatcaccaccggaatcggcatgtttaccggacccagactacccggaccggctttaaccacggcacgaatttcttcttcggtcgcgaaagtcagcgggcttgcaacctgcggcagtttttctgctttaacttcgttcagctcgtgatcaccgcgcaccagcagcgcaacctgcgggaagctgctgccttcaaccgctttaaccagcagagtcttaaccgttttctcaatcggcagattgaactgttcaaccagttccgcgatggttttcgcgttcggcgtatcaaccagcgtcatttcctgggtagcagcagcgcgcggttctttcggcgcgatagcttctgccagttcaatgttcgctgcatagtcagaggtgtcggagaagaccacatcgtcttcaccgctctgcgccagcacctggaattcgtgagaggcgctgccgccgatagaaccggtgtcggcttgtacggcgcggaaatccagccccatgcggctgaagattttgctgtaggccgcatacattgcatcgtaggtttcctgcagggattcctgagaagtatggaaagagtaagcatctttcatcaggaattcgcgggaacgcatgacgccgaaacgcggacgcacttcgtcgcggaacttggtctggatctgatagaagttcagcggcagctgtttgtaagagctaagctcgttacgaatcaggtcagtgataacttcttcatgagttgggccgagtacgaacggacgctcgccacggtcaacaaaacgcagcagttccggaccgtactgttcccaacgaccactctcttgccacaaatcggctggctgaaccaccggcatgctcacctcgatcgcaccggcgttgttcatctcttcacgcacgatgttttcgacttttttcagaacgcgcacgccggtcggcagccaggtatataacccggaggccagcttgcggatcatcccggcgcgcagcatcagctgatggctgatcacctcggcgtcggcaggtgtctccttgagagtggagagcaggtattggctagtacgcatgttgttacggttccagttggaaggtagaacaggctcaaggcgagcctgggacaaaaaaagtgatttagtttaccagtgcaaaagaaatgtcaaaagagaagggcgtgaatttaacgcggttccagcgcaaagacttcaaaacctgcgtcggtgacgcgccagcgaacgttaaaatcatgtagccagacggcataggttttgcccgtttcctcacctttacgataggccgggcgcgggtcctgcgccagtacttcgcggataaacagcgttaactgcggataacgcttctccagcgtcaaaagctgcttttcgacctctgcggtaaaactcaccgccatctctgcagctggcgcactttgcgcatagctggcactggcatcgggaaggctttcggcaaaggggagatacggtttgatatccactaccggcgtaccatcgaccagatccagactgccgagcttcagaatcacgctgtctttatggcaaacaacctctttcagctctaccaggctcatgccaattgggttagggcggaaagtagagcgtgttgcgaaaacccccattctggcgttaccgccgaggcgcggtggacgcacagtcggacgccagccgccttccatcgtttgatgaaagacgaaaaggatccataaatggctgaacgcttccaggccgcgaacggcgtcggcctggttgtagggagcaatgagatgcagttcgccgttggcgctttttaccagacctggctggcgcggaacggcgaacttttctttataggggctgcgaataacgcctatttgctcgaactggaaactgctcatttcgccgtaatgttaagcgcagaaccgatacatacagcctgacgatagcagcctggcgtaccgctggtgacttcgcagctatgcagtaatacagcattggctttcattttagaggcgttgatttgcatccgcttacgtgcggttggaatgctcggcggagagtcctgattagaggcctggcaagagtcgccactgacttcaccgagatcgcggaacggtttgccgactaattcttctgcattggtataaattcggaccggcgtggcgcgcggcgctttcggttttgcaggctccgctttcggctggggtgcagtgctttgaacgggttcgacaggggatctgcttaacatggaacagccgcttagcatgagtgctactaaacagatcggtaaagcacgcatagtatttcctcaatgtatgatcaaaacgtcaatattgaatcaggagcttgtaaaaatgacaagacgggcaagcgcccgtcctgaatgatattacaaattgtggaaacagcctaaaaattaccagcctttaacagctccgccgttaaacactttgtttgctgcttcgtaaacttcgtcagactgataagcctggacgaatttcttcacgttctcggcgtctttgttatcttcacgcgtcacgatcaggtttacgtacggggactctttatcttcaacaaagataccgtctttcgccggagtcaggccaatctggctggcataggtggtattgataactgccagagcgatttgcgcgtcgtccagagaacgcggcagttgcggtgcttccagttcaacaattttcagatttttggggttctcaacaacatcaagaacggtcggcagcaggccaacgccatctttcagtttgatcaagcccactttttgcagcagcagcagactacgaccaaggttagttgggtcgtttggcacggcaacctggctaccatcctgcagttcatccagacttttgattttcttggagtaaccagcaatcggataaacaaaagtgttgcctactgcgaccagtttgtagccacgatctttcagttgctgatcaaggtacggtttatgctggaaggcgttggcgtcgatatcgcctttgctcaatgcttcgtttggcagaacatagtcgttgaaggttaccagctcaacgtccaggccatatttgtctttcgcaactttctgcgcgacttctgcaacctgctgttcggcaccaacaatcacgccgactttaatgtggtttggatctttttcatcctgaccgcagcctaccagtgccagacttccgatcagggctcccactgccgcaaaggttttgaatttgaacgccataccttattccttcttcaattatttatgttgtgttgaacgttacttgcgagtgacagcccggacgatgcggtcgcctgcgaactgaattaaataaaccagaatgaccagcaataccagtaccgtattcatcaccgtcgcgttatagccgatgtagccatactgatagccaatctgacctaaaccaccggcaccgactgcaccacccatcgcggaataaccgaccagggtaatcagggtgatagttgccgcattcaccagacccggcagcgcttccggtaacagcaccttacggacgatctgcatcggcgtggcacccattgcgcgggaagcttcaattaacccggttgggatctccagcagagcgttctcgaccatacgggcaataaacggtgctgcaccaacggttaacggaacaatcgctgcctgcaaaccaatgcttgtaccgacaataacgcgggtaaacggaatcatccatacaagcaagataatgaacgggatggaacggaaaatgttcacaatcgcagaaacggtacgatacagcttcgcgttagcaataatttgccccggacgcgtgacataaagcagaacgccaaccggcagaccaatcacaaagccaaaaaaaccggatacgaaggtcattgccagcgtttcccatacgccacgaaccagcagccacatcatcggctcagacataacccagtacctctacttttacatggtgttcctgcagccaggcaatggcggcttgcgtatcttgttgtgtgccgtgcatttcagtcagcatgatgccgaacttaacgccaccggcgtaatccatctgcgcgctaataatgttgttgttgacgttgaaacgacgcgcggtttcagaaagcagtggggcatcgacgctttgaccggtaaactccagacgcagcatcggcacgcagtcagtaaatggctccgcttgcagacgttcctggtaatcttccgggatatccagatgcagggtgctctgaataaacttctgcgccagcggcgttttcggatggctgaacacttcacttaccgtgtcctgctcgatcagttctccattgctgatgaccgccacgcaatcacaaatgcgcttcacaacgtccatttcgtgggtgatcaacagaatcgtcaaccccagacggcggttgatgtctttcagcagttcgagaatagaacgtgtcgttgccgggtccagcgcgctggtggcttcatcacacagcaatactttgggattgctggctaacgcacgggcaattgccacacgttgtttctgcccaccggaaagattgctcgggtagctatcatgcttatcgccaagaccaaccaaactcagcaattccgtcacgcgacgtttgacctcgtctttcggtgtgttgtccagctccagcggcagagccacgttgccaaaaacagtacggctagagagcaggttaaaatgctggaaaatcataccaatctggcggcgagctttggtcaactcggattcactcagcgtggtcagttcctggccatcgaccagcacgctaccctcggttgggcgctccagcaggtttacacaacgtataagcgtactcttacccgcgccactggcaccgataacgccataaatttgtccagctggcacatgcaggctgacgttgttcaacgcctggatggtgcgggtgccctggtggaacactttggtgatattgctaagttttatcattgattatttattatcgtcattaagttagtcgtggcatctcgaatgcctgaaacgggcaacgccgtcaatgaaatggatgttaaggcatccagacgtctaaatcaatcaggtttatgcgaagagcactttcttgcaggtcgaaacatgcgatactagcgtcacatgccttattaaggagctataaaaggtggcgaagagcgtacccgcaatttttcttgaccgtgatggcaccattaatgtcgatcacggctatgtccatgagatcgacaactttgaatttatcgacggtgttattgacgccatgcgcgagctaaaaaaaatgggctttgcgctggtggtagtaaccaaccagtctggcattgctcgcggtaaatttaccgaagcacagtttgaaacgctgaccgagtggatggactggagcctggcggaccgagatgtcgatctggatggtatctattattgcccgcatcatccgcagggtagtgttgaagagtttcgccaggtctgcgattgccgcaaaccacatccggggatgcttttgagtgcacgcgattatttgcatattgatatggccgcttcttatatggtgggcgataaattagaagatatgcaggcagcggttgcggcgaacgtgggaacaaaagtgctggtgcgtacgggtaaacctattacgcctgaagcagaaaacgcggcggattgggtgttaaatagcctggcagacctgccgcaagcgataaaaaagcagcaaaaaccggcacaatgattaaaagatgagcggttgaaataaaaatgcatttttccgcttgtcttcctgagccgactccctataatgcgcctccatcgacacggcggatgtgaatcacttcacacaaacagccggttcggttgaagagaaaaatcctgaaattcagggttgactctgaaagaggaaagcgtaatatacgccacctcgcgacagtgagctgaaagccgcgtcgcaactgctctttaacaatttatcagacaatctgtgtgggcactcgaagatacggattcttaacgtcgcaagacgaaaaatgaataccaagtctcaagagtgaacacgtaattcattacaaagtttaattctttgagcatcaaacttttaaattgaagagtttgatcatggctcagattgaacgctggcggcaggcctaacacatgcaagtcgaacggtaacaggaagaagcttgcttctttgctgacgagtggcggacgggtgagtaatgtctgggaaactgcctgatggagggggataactactggaaacggtagctaataccgcataacgtcgcaagaccaaagagggggaccttcgggcctcttgccatcggatgtgcccagatgggattagctagtaggtggggtaacggctcacctaggcgacgatccctagctggtctgagaggatgaccagccacactggaactgagacacggtccagactcctacgggaggcagcagtggggaatattgcacaatgggcgcaagcctgatgcagccatgccgcgtgtatgaagaaggccttcgggttgtaaagtactttcagcggggaggaagggagtaaagttaatacctttgctcattgacgttacccgcagaagaagcaccggctaactccgtgccagcagccgcggtaatacggagggtgcaagcgttaatcggaattactgggcgtaaagcgcacgcaggcggtttgttaagtcagatgtgaaatccccgggctcaacctgggaactgcatctgatactggcaagcttgagtctcgtagaggggggtagaattccaggtgtagcggtgaaatgcgtagagatctggaggaataccggtggcgaaggcggccccctggacgaagactgacgctcaggtgcgaaagcgtggggagcaaacaggattagataccctggtagtccacgccgtaaacgatgtcgacttggaggttgtgcccttgaggcgtggcttccggagctaacgcgttaagtcgaccgcctggggagtacggccgcaaggttaaaactcaaatgaattgacgggggcccgcacaagcggtggagcatgtggtttaattcgatgcaacgcgaagaaccttacctggtcttgacatccacagaactttccagagatggattggtgccttcgggaactgtgagacaggtgctgcatggctgtcgtcagctcgtgttgtgaaatgttgggttaagtcccgcaacgagcgcaacccttatcttttgttgccagcggtccggccgggaactcaaaggagactgccagtgataaactggaggaaggtggggatgacgtcaagtcatcatggcccttacgaccagggctacacacgtgctacaatggcgcatacaaagagaagcgacctcgcgagagcaagcggacctcataaagtgcgtcgtagtccggattggagtctgcaactcgactccatgaagtcggaatcgctagtaatcgtggatcagaatgccacggtgaatacgttcccgggccttgtacacaccgcccgtcacaccatgggagtgggttgcaaaagaagtaggtagcttaaccttcgggagggcgcttaccactttgtgattcatgactggggtgaagtcgtaacaaggtaaccgtaggggaacctgcggttggatcacctccttaccttaaagaagcgtactttgcagtgctcacacagattgtctgatgaaaatgagcagtaaaacctctacaggcttgtagctcaggtggttagagcgcacccctgataagggtgaggtcggtggttcaagtccactcaggcctaccaaatttgcacggcaaatttgaagaggttttaactacatgttatggggctatagctcagctgggagagcgcctgctttgcacgcaggaggtctgcggttcgatcccgcatagctccaccatctctgtagtggttaaataaaaaatacttcagagtgtacctgcaaaggttcactgcgaagttttgctctttaaaaatctggatcaagctgaaaattgaaacactgaacaatgaaagttgttcgtgagtctctcaaattttcgcaacacgatgatggatcgcaagaaacatcttcgggttgtgaggttaagcgactaagcgtacacggtggatgccctggcagtcagaggcgatgaaggacgtgctaatctgcgataagcgtcggtaaggtgatatgaaccgttataaccggcgatttccgaatggggaaacccagtgtgtttcgacacactatcattaactgaatccataggttaatgaggcgaaccgggggaactgaaacatctaagtaccccgaggaaaagaaatcaaccgagattcccccagtagcggcgagcgaacggggaggagcccagagcctgaatcagtgtgtgtgttagtggaagcgtctggaaaggcgcgcgatacagggtgacagccccgtacacaaaaatgcacatgctgtgagctcgatgagtagggcgggacacgtggtatcctgtctgaatatggggggggaccatcctccaaggctaaatactcctgactgaccgatagtgaaccagtaccgtgagggaaaggcgaaaagaaccccggcgaggggagtgaaaaagaacctgaaaccgtgtacgtacaagcagtgggagcatgcttaggcgtgtgactgcgtaccttttgtataatgggtcagcgacttatattctgtagcaaggttaaccgaataggggagccgaagggaaaccgagtcttaactgggcgttaagttgcagggtatagacccgaaacccggtgatctagccatgggcaggttgaaggttgggtaacactaactggaggaccgaaccgactaatgttgaaaaattagcggatgacttgtggctgggggtgaaaggccaatcaaaccgggagatagctggttctccccgaaagctatttaggtagcgcctcgtgaactcatctccgggggtagagcactgtttcggcaagggggtcatcccgacttaccaacccgatgcaaactgcgaataccggagaatgttatcacgggagacacacggcgggtgctaacgtccgtcgtgaagagggaaacaacccagaccgccagctaaggtcccaaagtcatggttaagtgggaaacgatgtgggaaggcccagacagccaggatgttggcttagaagcagccatcatttaaagaaagcgtaatagctcactggtcgagtcggcctgcgcggaagatgtaacggggctaaaccatgcaccgaagctgcggcagcgacgcttatgcgttgttgggtaggggagcgttctgtaagcctgtgaaggtgtactgtgaggtatgctggaggtatcagaagtgcgaatgctgacataagtaacgataaagcgggtgaaaagcccgctcgccggaagaccaagggttcctgtccaacgttaatcggggcagggtgagtcgacccctaaggcgaggccgaaaggcgtagtcgatgggaaacaggttaatattcctgtacttggtgttactgcgaaggggggacggagaaggctatgttggccgggcgacggttgtcccggtttaagcgtgtaggctggttttccaggcaaatccggaaaatcaaggctgaggcgtgatgacgaggcactacggtgctgaagcaacaaatgccctgcttccaggaaaagcctctaagcatcaggtaacatcaaatcgtaccccaaaccgacacaggtggtcaggtagagaataccaaggcgcttgagagaactcgggtgaaggaactaggcaaaatggtgccgtaacttcgggagaaggcacgctgatatgtaggtgaagcgacttgctcgtggagctgaaatcagtcgaagataccagctggctgcaactgtttattaaaaacacagcactgtgcaaacacgaaagtggacgtatacggtgtgacgcctgcccggtgccggaaggttaattgatggggttagcgcaagcgaagctcttgatcgaagccccggtaaacggcggccgtaactataacggtcctaaggtagcgaaattccttgtcgggtaagttccgacctgcacgaatggcgtaatgatggccaggctgtctccacccgagactcagtgaaattgaactcgctgtgaagatgcagtgtacccgcggcaagacggaaagaccccgtgaacctttactatagcttgacactgaacattgagccttgatgtgtaggataggtgggaggctttgaagtgtggacgccagtctgcatggagccgaccttgaaataccaccctttaatgtttgatgttctaacgttgacccgtaatccgggttgcggacagtgtctggtgggtagtttgactggggcggtctcctcctaaagagtaacggaggagcacgaaggttggctaatcctggtcggacatcaggaggttagtgcaatggcataagccagcttgactgcgagcgtgacggcgcgagcaggtgcgaaagcaggtcatagtgatccggtggttctgaatggaagggccatcgctcaacggataaaaggtactccggggataacaggctgataccgcccaagagttcatatcgacggcggtgtttggcacctcgatgtcggctcatcacatcctggggctgaagtaggtcccaagggtatggctgttcgccatttaaagtggtacgcgagctgggtttagaacgtcgtgagacagttcggtccctatctgccgtgggcgctggagaactgaggggggctgctcctagtacgagaggaccggagtggacgcatcactggtgttcgggttgtcatgccaatggcactgcccggtagctaaatgcggaagagataagtgctgaaagcatctaagcacgaaacttgccccgagatgagttctccctgactccttgagagtcctgaaggaacgttgaagacgacgacgttgataggccgggtgtgtaagcgcagcgatgcgttgagctaaccggtactaatgaaccgtgaggcttaaccttacaacgccgaagctgttttggcggattgagagaagattttcagcctgatacagattaaatcagaacgcagaagcggtctgataaaacagaatttgcctggcggccgtagcgcggtggtcccacctgaccccatgccgaactcagaagtgaaacgccgtagcgccgatggtagtgtggggtctccccatgcgagagtagggaactgccaggcatcaaattaagcagtaagccggtcataaaaccggtggttgtaaaagaattcggtggagcggtagttcagtcggttagaatacctgcctgtcacgcagggggtcgcgggttcgagtcccgtccgttccgccacttattaagaagcctcgagttaacgctcgaggttttttttcgtctgtatatctattattgccagaatcgcaaaaatcctctgcattttacgctctttttcctcaacagtctgaagcccataatcacctcagttaacgaaaatagcattaaaagaggcatattatggctatccctgcatttggtttaggtactttccgtctgaaagacgacgttgttattagttctgtgataacggcgcttgaacttggttatcgcgcaattgataccgcacaaatctatgataacgaagccgcagtaggtcaggcgattgcagaaagtggcgtgccacgtcatgaactctacatcaccactaaaatctggattgaaaatctcagcaaagacaaattgatcccaagtctgaaagagagcctgcaaaaattgcgtaccgattatgttgatctgacgctaatccactggccgagtccagacgatgaagtctctgttgaagagtttatgcaggcgctgctggaagccaaaaaacaagggctgacgcgtgagatcggtatttccaacttcacgatcccgttgatggaaaaagcgattgctgctgttggtgctgaaaacatcgctactaaccagattgaactctctccttatctgcaaaaccgtaaagtggttgcctgggctaaacagcacggcatccatattacttcctatatgacgctggcgtatggtaaggccctgaaagatgaggttattgctcgtatcgcagctaaacacaatgcgactccggcacaagtgattctggcgtgggctatgggggaaggttacagtgtaattccttcttctactaaacgtaaaaacctggaaagtaatcttaaggcacaaaatttacagcttgatgccgaagataaaaaagcgatcgccgcactggattgcaacgaccgcctggttagcccggaaggtctggctcctgaatgggattaagcctctctgacagctcctccgggagctgtttttacatgctcgctaaggaaatcgataaaagcccggatgcgcgtacttaccgcacggtcgctgtaatagacggcactgaatggcatttccactggcaacactttatctgccattaactccaccaattctccgcgagcgatttctttgtcgatcatgtagtcggacaaacacgcaatcccgttgccactcaggcaaagctgtttcagtgtttccccactattggaactcaaaccgtacttcacctcatgtaattgtccatcgctacgggctatcggccaggtattgagggaagcgggttcagtgaatcccaggcaaatatgttgctttaaatcgtcgatcgtttctggcttcccgtagcgggaaatataatcgggggaggcgataatttttcgataactgttaaataacggcctggcacgtaagctggaatccgttaacgtaccagcgcgtatcgcgacatccacttttctttcgatcaaattaataatcgtttcggaggagactaggctcaaagtgacttccggatagcgttcacggaaaggcttaattaacggcatcagaaagtgcagcaccactggagttgcggcatcgatccgtaacagtccacgcggtgtattacgcgtctccataatttcactttctgccgctgccatctcctgcaaaatactctgtacgcgacgaaaataacgctcgccttcttccgtcaggctaagttgtcgcgtggtccgattaagcaggctaacgccaagtttcatctccagctttttcaccgcccggcttaccgcactgtttgcttgccctaattgttccgctgcccggctaaagctgccgctttcgacgacgctaacaaaaatggcgagttcttcgctcgtggctttcatttttgctcctgttgcaaaatagaagagatattttgaatttatttgtcattaaaccatcaggatgcgtgatatgtcatgcgatttaatgttctccataatgagcaaaattctgaccggtgtaagcacttgcttacataacaatatacaattgctcgttgaaagagtgagctaaaatccctataacagtagaaccctcccgagtgcggaagggttgacgtaatagaggtttcaaagtcaaaagtgcgaaaaaacacctatgccatgcgctatgttgccggacaacctgcggaaaggatcttaccgccggggtcttttgcgagcatcggccaggcattaccacctggggaaccgttaagtaccgaagagcgtattcggatcctggtgtggaacatatacaaacagcaacgcgctgaatggttgagcgtattaaagaactacggcaaagatgcacatctggtgttattgcaggaagcgcagacaacgccagagttagtacagtttgcgaccgctaactatcttgccgccgatcaggtacccgctttcgtgctgccacaacatccttctggcgtaatgacccttagcgcggcacatccagtgtattgctgcccgttacgtgaacgagaacccattttgcgtctggcgaagagcgcactggtgacggtctatccattacctgacacccgcctgttgatggtggttaatatacacgccgtcaacttcagtctgggcgtggatgtctatagtaagcagttacttcctattggcgatcagatagctcaccacagcggcccggtcattatggcgggagatttcaatgcctggagccgtagaaggatgaacgcgttatatcgctttgcgcgggaaatgagcctgcgccaggtgcgttttaccgatgatcagcgccgtcgggcgtttggtcgcccgctcgattttgttttctaccgtggtctgaacgtcagtgaagcttctgtactggttacgcgcgcttccgatcacaatccgctactcgttgaattcagtcccggcaagcctgataaataaggtatgagtggtctgccacagggcagaccaacgtttggcgctgcgcaaaacgtgagcgcggtggtggcgtatgacttatctgcccacatgctggatgtcgtggcacaagctgccgaagcccggcaactgaaaaatatcaccacccgccagggatatgccgaaagtctgccatttgccgataacgcatttgatattgttatcagccgttattctgcccatcactggcatgatgttggtgcagcactgcgagaagtgaataggatattgaaacctggcggtaggctgattgtgatggacgtaatgtctccgggtcacccagtgcgcgacatctggttacagacggtagaagcattacgcgatacctctcacgtacgaaactacgccagcggtgagtggttgacgttaatcaatgaagccaatctgatagttgataatttaattacagataagttaccgctggaattttctagttgggtcgcgagaatgcgtacgccagaagcgttagtagacgctattcgcatttaccaacagagcgcaagcacagaggtgagaacgtattttgccttgcagaatgatggctttttcaccagtgatatcatcatggtagatgcacataaagcggcataaataaaaaaggcaccgggggaatcggtgcctttttattatctggtttgtcaggaatctggcatgttgttgtttttcacaaacaacgtcagcttatcgcctggttgcagattcgcagtgtcgctgttccagcgcatcacatctttgatgttcacgccgtggcgtttagcaatgctactaaggctatcgcctttgcgcacacgatacgtaatgctatcgctgttgtttgccagtcgctgtgcgctactgcctgcaccaatcgtcaaactttggcctggcttcagcttagatccgcgcagtttgttccactgctgcaaatctttggtgcttacgccgagacgactagcgatactactaagcgtgtcgccagagcgtacggtgtaaacacggctgttaagcggcgtattgtcggcaaccagcgtgctctgtacagcagcaatttcgccactagccagagattcacgcagttgatctgcatgcttctttggcaccatcacgtactgcgggccacttgcgcccagcgtggagccttttacgccagcgttgaatgtcttcagcttgctgacggaaatccccgccatatctgctaccttcgccatttcaaccgggctgctcaggtgcacacgcgccagagcacggctttcatcggtcgttggcagacgtacgccataacgcttgctgtttttgagaatatcactcaatgccagcattttaggcacgtactgcttcgtttcctgcggcaacggtaagctccagaagtccgtggatttcccacgcgctttgttcgttttaattgccttcatgacccgaccttcgccgctgttataagccgctacggtcagaagccagtcgccgtcaaacattttgttcagacgctgcatcatattcagcgcggcagttgcactagcaacaacatcgcgacgcgcgtcataattgcgggtctgtttcaaaccataattgcgccccgtgctcggaatgatctgccagatgcctgcggcattggcgccagacgttgcgtgaggatcaaaagcgctctccactatgggtagtagtaccagttccataggcatgttacgttttttaacttgccctgctatccagtacatatacggctctgcccgtaaagttacatcgtggagatagctcttattgcgtaaatatttctgtttctgttcgcgaatccggtcattttccggaattcccatctttagctcgtcgccaatgaaagcccacaagtcaccatctggcgcgatagacgtcccatcgtccatccatcgtgcctgacttgtaaactttgctgcttccccttgaccagctgcagaaaggctctgtgcgtgctgttgaacgttgccggtactctggcaacccacgagcaggacagaggcgagtaatatcgcttttgccttcatgtgtgtgtcaatagttgcttaaaagacgaccgatcataacggcgaacggagccgatgacaagaaagttttatcagaacctatctttcttactccttaaccatgcaaaacgctcttcaggttgttgcaataatgtttcttcattaattacattaattaaatcaatatcttccgttcttaaaaaaacattaatttgccgctcatttttcagaattacgggtagtgttatttgattttttgcccgtaactccttaactttacgataataatcatttatggacaaatcgtgcggaagaatactcaaagcaaacttcatattacttaaggtatattcatgagcacaacataccaatgtatcgtcaggtaacgcacttaactttttaagactttgatacatttgacttgctgtcccttcaaacaaccgaccacacccaccagaaaacagtgtgtcgccgcaaaatagataaggtttactgaagtaacagatatgtcctaaagtgtgacccggcgtagcaattacactaaattcatgccccaaaacgaaggcagtttcgccatctttgactacctgtgttgttcccttatcttgtgtctcttgtggaccatacaccacaatttgtggaaacttttccaccagttcttttacgccgccaacgtgatcgtggtgatggtgggtgagaaatatggcctccggttgccagttattggcggcaatggcgtttaatactggctctgcgtctccgggatcgacaatcaggcagcgacctgcttcatcattcaaaacccagatgtaattgtcatcaaaggcgggaatactgttaagattcatagattacctctcagtgtgaaacggaaggttgtgatgaaaccggcaagagtccctcaaactgtcgtggctcctgattgctggggcgatttgccctggggaaagctttatcgcaaggcgctggagcgccagctcaacccgtggttcactaaaatgtatggttttcatctgcttaagattggcaatttaagcgcagaaatcaattgcgaagcgtgcgcggtttctcatcaagtgaatgtttctgcgcaaggaatgcccgtccaggtacaggcggacccacttcatcttccttttgccgataaatccgttgatgtttgtctactggcacatacattgccgtggtgcaccgatccgcatcgtttattgcgtgaagccgatcgggtattgattgatgatggctggctggtcattagtggcttcaatcccatcagttttatgggattacgcaaacttgtgccggtattgcgcaaaaccagcccctataacagccggatgtttactctgatgcggcagctggactggctctctttgttgaattttgaagtgctacacgccagccgtttccacgttctcccgtggaacaaacacggaggaaaactattgaatgcgcatattcctgcgcttggttgcttacaacttattgttgcccggaaacggactattcctttaacgctaaatccgatgaaacagagtaaaaacaagccacgaattcgccaggcggttggagccacccggcaatgtcgtaaaccacaggcttaaacttcaacttggtagcctgtatcttccagtgtgggattcatcgccgcggcacgagccagttcatcacagcgttcgttttccgggtgtccggcatggcctttaacccattcccatttgatttgatgctgccccaatgcagcatcaagacgttgccagagatcgacattttttactggttttttgtctgcggttttccagccacgttttttccagttatggatccactgggtgataccctggcggacatactggctgtcggtactcaaaatgacttcgcaatgttcttttaacgcctccagcgcgacaatagcggccatcaactccatacggttgttggtggtgcgggtgtagccagcgctaaaggttttctcgcgtccgcgatagcgtaaaatagcgccgtaacccccaggtcctggattgcccagacagctaccatcggtgaaaatttctacctgtttaagcatctctggtagacttcctgtaattgaatcgaactgtaaaacgacaagtctgacataaatgaccgctatgagcactgcaattacacgccagatcgttctcgataccgaaaccaccggtatgaaccagattggtgcgcactatgaaggccacaagatcattgagattggtgccgttgaagtggtgaaccgtcgcctgacgggcaataacttccatgtttatctcaaacccgatcggctggtggatccggaagcctttggcgtacatggtattgccgatgaatttttgctcgataagcccacgtttgccgaagtagccgatgagttcatggactatattcgcggcgcggagttggtgatccataacgcagcgttcgatatcggctttatggactacgagtttagcttgcttaagcgcgatattccgaagaccaatactttctgtaaggtcaccgatagccttgcggtggcgaggaaaatgtttcccggtaagcgcaacagcctcgatgcgttatgtgctcgctacgaaatagataacagtaaacgaacgctgcacggggcattactcgatgcccagatccttgcggaagtttatctggcgatgaccggtggtcaaacgagcatggcttttgcgatggaaggagagacacaacagcaacaaggtgaagcaacaattcagcgcattgtacgtcaggcaagtaagttacgcgttgtttttgcgacagatgaagagattgcagctcatgaagcccgtctcgatctggtgcagaagaaaggcggaagttgcctctggcgagcataaatacctgtgaaaggcgctaaaaatagcgacttgggcgatttttgcagcaaacgattcaaaagatgagaaaaaccgttgacgaaggtcgaggcaatccgtaatattcgcctcgttcccaacggaacacaacgcggagcggtagttcagtcggttagaatacctgcctgtcacgcagggggtcgcgggttcgagtcccgtccgttccgccactattcactcatgaaaatgagttcagagagccgcaagatttttaattttgcggtttttttgtatttgaattccaccatttctctgttcaatgattttactctggcgtaggtgcgtgattctcgcttgttgtctcattcattaaaattcaataatgatatcgaaccattcagcttaaatatatttctagagaataaatttatattgattaaatgaatgtatatttcaaattgattttgtttgttattatttaagtgaggtatataattagagtccgttatcaatgctaaatattctaatcattatgacaggcgagggagtgtccaattatgaatagtaaaaagctttgttgcatatgtgtgttattcagcctgcttgcaggatgtgcctctgaatcttctattgatgaaaagaagaaaaaagctcaagtcacacaaagtaatattaataaaaacactccccagcaactgacagacaaagatttattcggtaatgaaaccactctggccgtatccgaagaggatattcaagctgcgcttgatggagatgagttccgcgttccccttaattctcctgtaatacttgttcaatccggcaaccgcgcaccggaaaccattatgcaggaggagatgcgaaaatattatactgtttccacattctctggtatcccggacaggcaaaagcctctgacttgtaacaaaaacaaagataaaaatgagaacgaggatgttgccagtgctgagaatatgaactggatgcaggcactgcgttttgtggctgcaaaaggacatcagaaagcgattattgtttaccaggatatgttgcagacaggaaaatatgactctgcgctgaaaagtacagtatggtccgactataaaaatgacaaactcactgacgctatctccctgcgctacctggtacgtttcacgctggtggatgtggcaacaggtgagtgggctacctggagcccggtgaattatgaatataaagtgcttccaccattgcccgacaagaatgaagccagtacgactgatatgacagagcagcaaatcatgcaacttaagcaaaagacctataaagcgatggtaaaagatttggttaaccgctatcaataataaattatatctgccgccaggaatttctggcggcaataatacaaaattctttgcataagaaatttttcttgacaaagacagtgcaagaaaggacatggaatccggagttaaaaactgtttgttttagaatatttaattatttaactgctgaatcttccttgcgagaaatatatccattattacatttcatgccatttttaatatagattgctcctgggaaaattcccgtattattaccgcaggggtgataattagtattgacatatcctgtgacaaaaggagctattaaaggtgctattacgatagctattagtaaaaatataagagttagctgtattgttatgtctgtggcgaaattgactaccttcgtttttttgattaagaatgattttattatcgtaagtaaaattacatgaatatttaaaaaggaaaacgacatgaaaccgaagcacagaatcaacattctccaatcataaaatatttccgtggagcattttattattgaatatagaggtttaactccggtaaaaaacaaagaagcattgaatgcagggaaaaataatatggccataaaaaacatcgaaagaaactcttttaatttaacatgtaaacgcatggttaatcctcatatcacgggtggagtgttaagaacatacataaatggagtcatgttttcccttttccatttatcaagttcctgttgccgttttagtccatctctaattgcatattttaatttttcacttaaatggcattgagcatcgatttcatttaaaacaactgtacacactatccctgtcagtaaaattgctcctccgacaagaattactggaaagccaaagctaacacaggcaaaagaagccagacttccaatagcggttgcaacaccaccggctataactgctttggccacatccatactaaaatcgccaagaaaattaaccagatctcgctcactactcataataaattctatggttctgctgatttaaccgcagagaagttcgccacagcaatccgaaaccactggcacgtggagaataagctgcacaggcgtctggacgtggtaatgaatgaagacgactacaaaataagaagaggaaacgcagcagaattatttagtgggatacggcacattgctattaatattttgacgaatgagaaggtattcaaggcagggttaagacgtaagatgcgaaaagcagccatggacagaaactacctggcgagtgtccttgcggggagcgggcttagctaataataccccgactctccccgtccttaaacacaacccccactcaccacaacctaaactcatccgcatcctgccatgccggaaacttttctctatattcccgcaatgctgccatgctcagctccgcatcaatgcgcgttgcctgatgcgcgtcggcagtagcgataatctctccttgcggattaatcacccggctgtcaccgcgataatggcagccgttgccatcgctgccgacgcgattgcatcccgccacatacgcctgattctcaatcgcgcgggccgtcagcaatgcctgccagtgcagagagcgcggagcaggccagttggcgacgtacagggcgaggtcataatcgttgagattgcggctccacacaggaaaacgtaagtcgtagcacaccagcggcaaaatacgccagccgcgccattccacaatcactcgcgcattgcccgctttataatgtagatgctcatctgccatgcggaacagatgacgcttatcataaaaatgtaccgtgccgcccggctcaaccagcaaaaagcggttaacgctaccagactccgtttgtaatgcaacactgcctgcaatcagcgcattgcactgctgcgccttagctgtcatccagttcactacgtcatcttgtgctaggctgctagctgccgcttccatggcaaagccgctggtaaacatctccggtagaacgatcacatcgcgcccggtaataccttccagttgacgatcaaaatgacgcaggttggcaggaccatccatccacaccagtggttgctgcaaaagcgtaatcttcaaaccaggcacggtgtacaactcctttatgcgaagggttttataactttaacaccttatcaggcagttgccttagcgcagaataaattgataacaaatgctgatattggaaatatctgatttgcaaattatcgtgttatcgccaggctttaggaggttaataacatgggcaggataagcagcggaggaatgatgtttaaggcaataacgacagtcgccgctctggtcatcgccaccagtgcaatggcgcaggatgatttaaccattagcagccttgcaaagggcgaaaccaccaaagctgcatttaatcagatggtacaagggcataagctgcctgcctgggtgatgaaaggcggtacttatactcccgcacaaaccgtaacgttgggagatgagacgtatcaggtgatgagcgcgtgcaaaccgcatgactgtggcagccaacgtatcgctgtgatgtggtccgagaaatctaatcagatgacggggctgttcagcactattgatgagaaaacgagccaagagaaactcacctggctgaatgtgaacgatgcgcttagcattgatggtaaaacggtgttgttcgcggcgttgaccggcagcctggaaaaccatccggatggctttaattttaaataattagcggataaagaaacggagcctttcggctccgttattcatttacgcggcttcaactttccgcactttctccggcaactttaccggcttcgtcgccagctcttccggatcaaagtcatcaacgttaatactgcgcagacggctttcttcagctttcaccagaatagcggcttcatctttatcaatcagccccttcaccagcgcgttgtgcgccagttcatccagacgggtaaacggcaggtttttacccagctctttacagatccgctgatgaattgggtcggcggcaatcacatccaccagcgcctcttccagcaagccaaccggattatgctcgctcggcgtcaggtactgaccgcgaccaatgcgggaacgggtggcgttcggcacttgtaaaatcttcgccactttatgatccagcttgtcagaaggtgccagataatgacgtccggtcgggaagatcaccacattcagcagcccggcaaccacgcggttcgggaagttttgcagtaaatcatccatcgcctgttcagcctgatacagcgcatcttgtacgccccagtgcaccagcggcaggtcggcttcattacggccttcgtcgtcataacgcttcagcacggcagaggcgaggtagagctggcttaaaatatcccccagacgggcgctgatgcgctcgcgacgtttcaggctgccgcccagcactgccatgctgacatcagaaagcagggcgaggttggcgctcaggcggttcaggtgctgatagtagcgtttagtggcatcgccggttggcgtgctgctggttaaaccgcgcgtcaggcccagccagaagctgcgaactttgttgctaccgacgtgaccgatatgtttgaacaacagtttatcgaacgcgttgacgtcattgttcttcgccgcttccatctcttccagcacgtacggatggcaacgaatcgctccttgtccgaagatcatcatgctgcgggtcagaatgttagccccttcaacggtgatggcaatcggtgcgccctggtaagcacgcgccaggaagttgctttgcccgagcataatgcctttaccgccggtaatatccatcgcatcaataatgttctgctgcccgcggtgggtacagtgatacttaacgatagcgctcagcacggcaggtttttcgccgagcataatgccgtaggtaatcaggcttgccgcagcatccatcacgtaggcattaccggcaatacgcgccagcggctcttcaatcccttccatcttaccaatagagattttgaactgacggcgaatgtgagcatacgcgccggttgccagcgctacgcttttcacgccgccggtactgttggaaggcagggtgatgccgcggcctacgctgaggcactccaccagcatccgccagccttgcccggccattttcggcccgccgatgatgtaatcgatcggcacgaagacatctttaccgcgcgtcggtccgttctggaacggtacgttcagcgggaagtggcgacgaccaatttccacgcccggcgtggtggttgggatcagcgcacaggtaatgcctaaatcttctgcaccgccgagtaatttttccgggtcggagagtttaaacgccagcccaagcacggtcgcaatcggtgccagcgtaatgtagcgtttgttccaggtcagacgcatccccagcacctgctggccctgccattcgcccatgcagacaatcccggtgtccggaatcgcgcccgcatcggaacccgcttccgggctggtcagtgcaaagcaggggatctcctgaccacgcgccagacgcggcagatagtgatctttctgctcgtcagtgccgtaatgttgcaacagttcgcccgggcctaaactgtttggcacgccgacggtaatcgccaggatcccgctcacgccggagagtttttgcagcacgcgagactgggcataagcgctgaactccagcccgccgtactcttttttgatgatcatcgcgaagaaacgatgctctttaaggtacgcccacaactccggcggcagatccgccagctcatgggtgatctggaaatcattcgccatccggcaggcttcttctaccgggccgtcgagaaacgcttgctcttcggcggtcaggcgcggctgcggatagttatgcagctttttccagtccggcttgccctggaacaagtcgccctcccaccaggtggtgcccgcatcaatcgcttctttctcagtgcggctcatcggcggcatcaccttacggaaaccgcgaaataccggcgcggaaatcatgctcttacgcataggcgcaaagttaaatggcacgaggataatggccagaggcaccagtacccacgcgctccacagaccagcaacgccgagggcggctgtccaggcgagcaaaatcagactgctgataaataagctcacgcggtgatagaacaacgcgccgagcaggacaaccgtagcgagaatactcaaaatcatcataacgaaaagccccttacttgtaggaggtctgaccacttgtgatgatatggttgtagtggatgtaaaaacatttagcaatatgtttacaatataattacaacaaagctcacattgttgctgtttttatccgcacttcaggtcaaaaagtcctggtcatagcacctgcccgtacttctcgcttttggcggtatccggtacactgcattttgtctattacatttatgctgaaggatatcctcatgtaccaggatcttattcgtaacgaactgaacgaagcggcggaaacgctggctaactttttaaaagatgacgccaatattcacgccattcagcgcgcggcggtcctgttagcagacagctttaaagccggtggcaaagtgctttcctgcggcaacggcggttcccattgcgacgctatgcactttgccgaagagttgaccggtcgctaccgtgaaaaccgtccgggctacccggcgattgctatttctgacgttagtcatatttcctgcgtcggtaatgatttcggtttcaatgatattttctcccgctacgttgaagcggtaggtcgcgaaggcgatgtactgctggggatctccacctccggtaactctgcaaacgtgatcaaagcgatcgcagcggcgcgtgagaagggaatgaaagtgatcaccctgaccggtaaagacggcggcaaaatggctggcacggcggatatcgaaattcgcgtaccgcactttggttatgccgaccgcattcaggagattcacattaaagtgatccatatcctgatccagttgattgaaaaagagatggttaagtaagtctggcgtaggccggataagacgtttacgccgcatccggcatttgtgcgctgatgcctgatgcgacgctgacgcgtcttatcatgcctacaaatctgtacgcgaaccgtaggccgaataatgcgttcacgccgcatccgacctgaaaattcttaaatcaatcttcgccgggggccatgcgctcccgctgttgtggaggttacccatgtgcgaattgctcgggatgagcgccaacgtccctaccgatatctgctttagtttcaccgggcttgtacagcgtggtggtggaaccgggccacataaagatggctggggcattaccttttacgaaggtaaaggctgtcgcacatttaaagatccacaacccagctttaattcccccatcgccaaacttgtccaggactacccgataaaatcctgtagcgtggtggctcatattcgccaggctaatcggggcgaggtggcgctggaaaatactcacccatttacccgcgagttatgggggcgtaactggacttatgcccataacggacaactgacgggctacaaaagtctggaaaccggcaacttccgcccggtaggcgaaaccgacagcgaaaaagccttctgctggctcctgcataaattaacgcagcgttacccgcgcacaccgggcaacatggcggcggtatttaaatatatcgccagtctggcggatgaactgcggcagaagggcgttttcaacatgctgcttagcgacgggcgctatgtaatggcgtattgcagcactaatttacactggatcacccgccgcgcgccgtttggcgtggcaacgttgctggatcaggatgtggaaatcgacttcagcagccagaccacaccgaatgatgtggtcacggtgattgcaacacagccgctgacgggcaatgaaacctggcaaaagattatgccaggcgaatggcgcttattttgcctcggggagcgtgtagtttgattattttgcctcggggagcgtgtagttacttgccagttgtggctgcacaacttcgtggcttaacggcttgctgaccacgtaacgaccattgaccacagaaacggttggtggcttacgggtttgctcaaagtagtcgtaacccggcttcagttgctcccagaagtccttaaagttggaatatttatggcgcttcatattggcgtcggtcatgcggaacgggtaaatactcacttgcacgctcggctgaccaaacaccagcgcaccagtaacgaactggaatatctcatcaataccctgattggtcattgcgtagcagccgatggaaacacaatcgccgtggatcatcaggtatttcccttcataaccatgcgcacggtcataggcattggggaaaccaatattaatcgctttgtagtaacggctgtctggttttaactgattacgctggacgctataaaacccttccgggcttttgaaatcgccctgacgctgttttggccctaagccgccggaatatttacagattttatagctgtcgagcagttgatattgctcgcccattttgacgtagagatcgagcgtacgttcttccttgaagatctggatgtagacaggggatcccatcaactgctgcttatactctttgctcacaggcgtggtagagctactgctgcccagcaaaccggcaaaactaacgcacgggatcaacaacatcgcaagaattaatgcgattttacgcatactgcttattccttgataaaacggttacacacgccaggacggcaaaatggatcccaaatcggaatagtctggatttggaaggctcacattatcaccaaaagagttttacgcaagcctgtcggcgcagggtttacaaatttcatcggaagcgggctttacccaaagagcgccgcgtgagttccagttctctcaaatcgtaaaagtttatcggtaagtttgtaaatcaggatccagtccggttcgacatgagcatcgcgataacctttccaactaccttgcagcgggtggtctttataaacagctggaagcggtaaagtattattgataagaagcgtcataagatatttcaatttattcatatccttatgacgcttttgtgcaagttttacatccttactatattgtccgctgtattcaatatccctttgaatcatatttaaattcctaatttatcaaataaatcatcggcgtctttggccttatgaacatcaatgccagcttcgctgtttttgatactttgaatggttaattgattaggctcgcgtaaatcaaacggcaatgccttttcacgcgcgacctttgtgagggttatgcgaaccaggtcagagatggtcagccccatcccggccagtacgtccgctgcctgattcttcagatcttcatcgattcgggcgcgaacaaacgcgttagcagccattggggtatctcctgtgctgtatatttattcagcttgaattgtagctcaaatgagcaacagcgacaatccatgagtaatttaataaacggatgtttttacataattaactgaaatatatatgttaattttataataatggtttattaagtttgttcagaaacgatccgggatacactgcaacattaaagcatgaccagccattattgagtatgtccttgccgagcattccatcctttgtattgagcggattactgttgatttgtttgccgttttctagttttgccagcgccaccacaagtcatatctctttcagctacgccgcccgccagcggatgcaaaaccgtgcgcgtttattaaaacagtaccaaactcatctgaaaaagcaggccagctatattgtggaaggcaatgccgaaagcaaaagggcgctacgccagcacaaccgggagcagataaaacagcatccagaatggtttcctgctccgctcaaggcgagtgacagacgctggcaggcgctggcggaaaacaaccactttttaagcagcgaccatctgcataacattaccgaagtggcgattcaccgcctggagcagcagcttggcaagccttacgtctggggcggtacgcggcctgataaaggctttgactgtagcgggttggttttttatgcctacaacaagatccttgaggctaagctcccgcgcacggccaatgagatgtaccactatcgccgggcaacgattgtggcgaacaacgacctgcgccggggagatttgctgtttttccatatccacagccgcgagatagccgatcatatgggcgtgtatttgggcgatgggcaatttatcgagagcccacgtaccggcgaaaccattcggataagccgattagccgaacctttctggcaggaccattttttgggcgcgcgcaggattttgacggaagagacgattttgtaagacggataaggcgtttacgccgcatccggcagttgtacgcaggtgcctgatgcgacgctggcgcgtcttatcatgcctacgagcccgcgaatatttgcgagccgctttcccgatataaaacaacctcattgccaacctttccttttcttcttaccgttgagaaaaaggagtcgccatgtctgaatatcgtcgttattacatcaaggggggaacatggtttttcacggtgaatttacgaaatcgtcgaagccaacttttgaccacccagtaccagatgctccgtcacgccattattaaagttaagcgagacaggccttttgaaatcaacgcctgggtcgttttgccagagcatatgcactgtatctggacattacctgaaggcgatgatgatttttccagccgctggcgggaaattaaaaagcaatttacccatgcttgtggattgaaaaatatctggcaaccacgtttttgggagcacgccatccgcaataccaaagattataggcatcatgttgattatatttatataaatccagtaaagcatggttgggtaaagcaagtgagtgattggccattcagtacgttccatcgcgatgtcgcgcgagggttatatcccatcgattgggcgggggacgtaacggattttagtgccggggagcgtatcattagttaattgtgcgcagatgcctgatgcgacgctagcgcgtcttatcatgcctacaaacttgtgccggatcggtaggccggataaggcgtttatgccgcatccggcagttatgcgcagatgcctgatgcgacgctggcgcgtcttatcatgcctacaaacttgtgcctgaacggtaggacggataaggcgttcacgccgcatccggcagttgtgcaccaatgctggatacttacatcaacgcccccataatcttcaactccagctcatccggcacttcgttatacgacagcacatgcagccccggcgcaaacaaccttgcataacgcgccagcaaagggcgcagctgcggtggcaccagcagcaccgggtctttccccgccgctttcatctgctctttcacctgtggcatcgtactctggaactggttgagcatattcggatcgaccggcacgctgtcgagcatcactttcccgccctgttgcgcctgattcaccacgttggtcagcagattttccagctcattattcagcgtatacaccgtcagctcctgcttgcgaacgaacggatgggtaatgctgcgccgcaatgccaggcgcacatcggccgccagcagaatatgatctttcgtcaccgtgctactggcgaccagcacggtggcgatggtgacgatatcgcgcagggaaacgccttcggtcagcagcgcccggtacactttcagcaactggctgtaattgagcgccgcgctcaaatcttccgccagacgcggtgccgtcgacgataaacggttatgcaactgcgtaatatcatcatagttaaacaaatcaggaatatagctgcgcacaatcttatttacatgggtagcgatcacgctggcgctgtcgatcacctgataccccatattcagcgccttcgctttctgcgccgcctggatccaggtgaccggcatcccgtacgccgggtcgttcccctgcacgccgtcaatctcgccgtaggtttcgctggagggcagggccatcagtttatccgccggaatatccgcttcatcagcctttatgccgttgatgaaaatggcgtactgactgggcttaaggcggaagttttcccgaatgcggatctccggcagcagcacgccgttgccgtcagaaatcacctgccgcacgccgcgaatccgctgggtgagcgggttaccctgtgctttgtccaccagcgccaccagtttgtaaccgaggcttaaactgataggctcgatcagcggaatggtttcccaactgacctgctgctcgctggtttcggtgatggtgcgggtcagcgtttcgaggcttttctcttccgcctccgccgccagcggctgtttgctcatccgccagccggtaaaaccaagcagggcgctgaacagcaaaaacggcaggtgcggcattcccggtaccaccgccagcacgaacataatcccggtggcggtgtagagcaccgacgggcttgccagcagctggttacgcacgtcatgggcgatatcgccgttgtcgctgacgcgggtgacgataatcgccgccgcggtggagagcagcagggaagggatctgcgccaccaggccgtcgccgatggtcatcagcacatactgctggaaggcagcatcggcgctcaggttgtatttgaagatcccgatacagacgccgccgatcaggttgatcgccagaatcatcatcccggcgatggcgtccccgcgcacaaacttcgatgccccgtccatcgcgccgtagaaatcggcctcgctggcaacatctttacgccgggtttgcgcctgcgcctggttgatcaatccggcgttaagatcggcgtcaatcgccatctgtttgccgggcatcgcgtctaaggtaaagcgggcagaaacctcggaaatacgctcggcccctttggtgacgacaataaagttgattgtcaacagcgtcagtaaatccgagcgtgaaagcattatcgccgcgctgcacgggcagtcgatttttaacggtggtgggctgtcgccgttaaataaaatcagcccgtctcatccgccaaaacctgccaccgtggcggtgccggaagagacggagaaaaaagcgcgtgatgtgaatgagaaaacggcgctgctgaagaagaaatccgccaccgagcttggtgagctggcaaccagtatcaacaccattgcccgtgatgcgcatatggaagcgaatctggagatggagattgttccccagggattacgcgtgctgattaaagacgaccagaaccgcgatatgtttgaacgcggcagcgcgaagattatgccgttctttaaaacgctgctggtggagctcgcgccagtgttcgactcgctcgataataaaattattattaccgggcataccgatgcgatggcctacaaaaacaatatctacaacaactggaacctttcgggtgaccgcgcgctttcggctcgtcgggtgctggaagaggccggaatgccggaagataaagtgatgcaggtaagcgcaatggcggaccagatgctgctggattccaaaaatccgcaaagcgcgggcaaccggcgcattgagattatggtgctgaccaaaagtgcgtccgatacgctgtatcaatactttggtcagcatggggataaagtggtgcagccgctggtgcaaaagctggataagcagcaggtgctttcgcagcgaacgcgttaaatgctgaatctttacgcatttctcaaaccctgaaatcactgtatactttaccagtgttgagaggtgagcaatgcgtaaaatcattcatgtggatatggactgctttttcgccgcagtggagatgcgcgacaatcccgccctgcgcgatatccctattgctattggcggcagccgcgaacgtcggggggtgatcagcaccgccaattatcccgcgcgtaaatttggcgtacgtagcgctatgccgacagggatggcgctcaaattatgcccacatctcaccttgcttccggggcgctttgacgcctacaaagaagccagtaatcatatccgtgaaatcttcagccgctacaccagccgcattgaaccgttgagtctggatgaggcttatctcgatgtcaccgatagcgtccattgccacggttctgcgaccctcatcgcccaggaaatccgccagacaatcttcaacgagctgcaactgacggcgtctgcgggcgtggcaccagtaaagtttctcgccaaaatcgcctccgacatgaataaacccaacggccagtttgtgattacgccggcagaagttccggcatttttacaaaccttaccgctggcaaaaatccccggcgtcggcaaagtcagtgcggcaaaactggaagcgatggggctgcggacctgcggtgatgtacaaaagtgtgatctggtgatgctgcttaaacgctttggcaaatttggccgcattttgtgggagcgtagtcaggggattgacgaacgcgatgttaacagcgaacggttgcgaaaatccgtcggcgtggaacgcacgatggcggaagatattcatcactggtctgaatgtgaagcgattatcgagcggctgtatccggaacttgaacgccgtctggcaaaggtaaaacctgatttactgattgctcgccagggggtgaaattaaagttcgacgattttcagcaaaccacccaggagcacgtctggccgcggctgaataaagctgatctaatcgccaccgcgcgtaaaacctgggatgaacgccgcggcgggcgcggtgtgcgtctggtggggctgcatgtgacgttgcttgacccgcaaatggaaagacaactggtgctgggattatgatgtatactattatgtatattctggtgtgcattattatgagggtatcactgtatgcatcgaattctcgctgaaaaaagcgtcaatatcactgagttacgtaaaaacccagctaaatactttattgatcaaccggttgcggttctttctaataatcgccccgcaggatatctcttaagtgccagcgcattcgaagcgttaatggacatgcttgctgaacaagaggagaaaaagcccataaaggcgcgcttccgtccaagtgctgcaagattagaggaaattacacgccgcgctgaacaatatcttaatgatatgacggatgatgatttcaatgactttaaggaataaggatgcgggtattcaaaacaaaacttattcgcctgcaacttacagcagaggaacttgatgcgttaacggcggattttatttcctataagcgtgacggtgttttgccagatatatttggtcgcgatgcactctacgacgactcctttacctggccattaatcaaatttgagcgagttgctcatattcatctggcaaatgagaataatccatttccgccacagttgcgccaattcagcagaacgaatgacgaagcgcatttggtatattgtcagggggcgtttgatgagcaagcatggttgctcattgccattctgaaacctgaacctcataaactggctcgagataacaaccaaatgcataaaattgggaaaatggcagaagcgtttcgcatgcgtttttgaatttatattatgaataacatacaaataagaaactatcagcctggcgattttcagcaactatgcgctattttcattagagcggttacgatgaccgccagtcagcattatagtccacaacaaatttccgcctgggcgcagattgacgaatctcgctggaaggagaaactcgcgaaaagtcaagtgtgggttgcgatcattaatgcacaaccggttggttttatttcccgcattgaacattatatcgatatgttatttgttgaccctgaatacacccgccgtggggttgccagcgctttgttaaaacctttgattaagtctgaatccgaacttacggtggacgcaagcataaccgcaaaacccttttttgaacgttatggttttcagacagttaagcagcagcgcgttgaatgccggggagcgtggtttactaatttttatatgcgatataaaccgcaacattaaatccagcttgcaatgaaaataacgcccgcctggtatgtgcgcgttttctgattccacaaactgcaaggaggtaaatcatgacaaatcctttatcaatgactctttgcagacctttccaggattaattctttttttcttgccctggattcgtctgccatttcctgatttttatatttatatactctaaataattcgagttgcaggaaggcgacaagcgagtgaatcgccaggagcttacataagtaagtgactggggtgaacgaacgcagtcgcagtacatgcaacttgaagtatgacgagtataaatggaatggtacatgggcaaatatattcgtcccttatccgatgcggtatttaccatcgcatctgatgacctgtggatcgagagtttagcgatccaacaattacacaccacggcaaatttacccaacatgcagcgcgtagtggggatgccagatttacaccccggacgcggctacccgattggcgcagcgttcttctctgttggtcgtttttacccggcaagacgtcgcggtaacggtgctggaaacagaaacgggccgctactctgacacactgcgtagcgcgctggtttctctcgatggcgataacgcatgggcattaagcgaaagctggtgtggcactattcagtggatttgtccgagtccgtatcggcctcatcatgggcgcaaaaactggtttctgggcattgggcgttttaccgctgatgagcaggaacaaagcgatgcaatccgttatgagacgctgcgtagcagcgggccgggcggtcaacatgtcaataaaaccgacagcgcggtacgcgccacgcatttggcatccggtattagcgtgaaggttcagagtgagcgtagtcagcatgctaacaagcggctggcacgattgctgattgcctggaagctggagcaacagcaacaggaaaatagcgcggcgctgaaaagccagcggcgaatgttccatcaccagattgaacgtggcaacccgcgacggacatttacagggatggcttttatcgaaggataatgaaggatgaaactgccggaaggcgattaaacgccatccggcagcaaatcaaataattacttcgccggaatttctttcagcagttcagtcagcagtgtccagtaatgacctacgctttcgatgtgaacttgctcatccggagagtgtggaccggtgatagttggcccgatagaaaccatgtccatttccggatacggttttttgaacagaccacattccaggcccgcgtggataatctggatgttcggcgtcttgttgaacaggcgctgataggtttcacgtaccagatgcatcaccggagaattagcgtccggctgccagccaggatatgcgcctttcgcttcggttttcgcgccagccagtttacccaggctatccagcatgctcaccacgtagtctttaccgctgtcgatcagactacggatcaggcagtgaatttctacgttattgtcagtcatggtcaccacaccgacgttcagggaggtttcaaccacacctttggctacatcggagttacgaatcacaccgttcggggtggcgttcagcagacgaataaaggtatcgcgagatttcgcaatcagggcagctttatcgttcgctacagagtccagcaacaaggccagatttttctctttttctgccagctcgtttttcaggatctcctgataggtattcaccagagatttcaggacgtcgactttatcagctgcgacagcaatggtcgcaaaggcttcacgcgggatggcgttacgcagtgtgccgccgttgaaatcgataaggcgcagatccagttcttccgcatgacccgccaggaagcgcaccagcagtttgttggcattacccagcccaacgtggatttccccgccggagtgaccgcctttcagaccttttaaggttaacttgaaggtttcaaaaccagctggaaccgcttcacgatctaaatgcaggttggaggtgaagtcgataccccccgcacaacccatgtagatttcaccttcttcttcggagtcggtgttaatcagaatatcagcctgcaaccagttgccctgtaagccgaacgcaccgtccataccggcttcttcggtcatggtcagcagcacttccagcgggccgtgaaccacgttttcgtcagccagaaccgccagcgcagaggccataccaatgccgttatccgcacccagcgtggtgccgcgcgctttaacccattcgccatcaatataaggctggataggatctttcgtgaagtcatgcacggtgtcgttatttttctgcggcaccatatcgaggtgggcctgtaagacgaccggtttacgattttccatacctgcggtagcaggtttacgaatcaggatattacctacctgatcgcgttcgacatggaaacctttctcttttgcccaaccaacaatgtattcagcgagttgctcttcatgataggacgggtgaggaatagaacagattttggcaaaaatatcccacagcggctgtggagataattgagacagttcagacacgttaagtctccttgtcgatcacccgcaaaacagtattgcaggtcacagggttagcagaaaatgttgtcaacacaagacaggcttgcgagatatgtttgagaataccactttatcccgcgtcagggagaggcagtgcgtaaaaagacgcggactcatgtgaaatactggtttttagtgcgccagatctctataatctcgcgcaacctattttcccctcgaacactttttaagccgtagataaacaggctgggacacttcacatgagcgaaaaatacatcgtcacctgggacatgttgcagatccatgcacgtaaactcgcaagccgactgatgccttctgaacaatggaaaggcattattgccgtaagccgtggcggtctggtaccgggtgcgttactggcgcgtgaactgggtattcgtcatgtcgataccgtttgtatttccagctacgatcacgacaaccagcgcgagcttaaagtgctgaaacgcgcagaaggcgatggcgaaggcttcatcgttattgatgacctggtggataccggtggtactgcggttgcgattcgtgaaatgtatccaaaagcgcactttgtcaccatcttcgcaaaaccggctggtcgtccgctggttgatgactatgttgttgatatcccgcaagatacctggattgaacagccgtgggatatgggcgtcgtattcgtcccgccaatctccggtcgctaatcttttcaacgcctggcactgccgggcgttgttctttttaacttcaggcgggttacaatagtttccagtaagtattctggaggctgcatccatgacacaggcaaacctgagcgaaaccctgttcaaaccccgctttaaacatcctgaaaccagcacgctagtccgccgctttaatcacggcgcacaaccgcctgtgcagagcgcccttgatggtaaaaccatccctcactggtatcgcatgattaaccgtctgatgtggatctggcgcggcattgacccacgcgaaatcctcgacgtccaggcacgtattgtgatgagcgatgccgaacgtaccgacgatgatttatacgatacggtgattggctaccgtggcggcaactggatttatgagtgggccacccaggcgatggtgtggcaacaaaaagcctgtgcggaagacgatccgcaactcagtggtcgtcactggctgcatgcggctacgttgtacaacattgccgcctatcctcatctgaaaggagatgacctggccgagcaagcgcaggctttgagtaaccgcgcctatgaagaggccgctcagcgtctaccgggcacgatgcggcagatggagtttaccgtacccggcggtgcgcccatcaccggctttttgcatatgccgaaaggcgatggcccgttcccgacggtattaatgtgtggtggtctggatgcgatgcagacggactattacagcctgtatgaacgttattttgcgccgcgcggcattgcgatgctgactattgatatgccgagcgtgggcttttctagtaaatggaagctcacccaggactccagcctgttgcatcagcacgtcttaaaggcgctgcctaacgtaccgtgggtggatcacactcgcgtcgcggcctttggtttccgtttcggcgctaacgttgccgtgcgtctggcataccttgaaagcccgcgtctgaaagcggttgcctgtcttggtccggtagttcataccctgttgagtgattttaagtgccagcaacaggtgccggaaatgtatcttgacgttctggccagtcgtttggggatgcatgatgcttccgatgaagcgttgcgcgtggagctgaatcgctatagtttaaaagtgcaaggattgctgggacgtcgctgcccaacgccaatgttaagtggctactggaagaacgatccgttcagcccggaagaggacagtcgcttaatcaccagtagttctgctgacggtaaattattagagatcccatttaacccggtgtatcggaattttgacaaaggtcttcaggaaatcaccgactggatcgaaaaacgcttgtgttaaaaatttgctaaattttgccaatctggtaaaacagttgcatcacaacaggagatagcaatgacgttaccgagtggacacccgaagagcagattgatcaaaaaatttaccgcactaggcccgtatattcgtgaaggtaagtgcaaagataatcgattctttttcgattgtctggctgtatgcgtcaacgtgaaaccggcaccggaagtgcgtgaattctggggctggtggatggagctggaagcgcaggaatcccgttttacctacagttaccagtttggtctgttcgataaagcaggcgactggaagagtgttccggtaaaagacactgaagtggttgaacgactggagcacaccctgcgtgagtttcacgagaagctgcgtgaactgctgacgacgctgaatctgaagctggaaccggcggatgattttcgtgacgagccggtgaagttaacggcgtgagtgaaatgtgccggatgcatcacatccggcaatattcattaaaactgatacgtcatgccaaccgcgacaatatcatcattattaatattcaatttgttatcgctatccagttggttgattttataatcaacaaacgcactcatatttttgttgaaataatacgtagcaccgacgtcgatataattgaccagatcttcatcaccgataccttcaatatctttccctttgcttaagacataacccaggcttggacgcagaccaaagtcaaactggtattgagcgaccgcttcaaagttctgtgtcttattggcaaagccgccagttattggcgtcattttgcgtgtttcagaatagaaagttgccagataaatattattggcatcgtatttcagacctgttgcccatgcttctgcacgcttgcctgtgccacggctttgcaggttctgctcgttggtgcgatcactgttggtataggccccactaatggcgaaatcgctgccgccaaagtcatatgtcaaactcgtgccgaagccatcgccgttttgctttttaacgtcgcggttttcgtttttcccttgatattgcagggttaagttcaggccatcgataacgccgaagaagtcggtgttccgatacgtcgccagaccgctggcgcgtttggtcataaagttgtcggtctgcgcgctggaatcgccaccaaattccgggaacatatcggtccaggcttccacgtcatacaacgcccccaggttacgaccataatcgaaagaacccaaatctttatatttcaacccggcaaaagcgagacgcgttttttgctgtgcagtatcactctctgctttattaccggcaaactctgcttcccaacgaccataaccagtcagttgatcgttaatttgtgtttcgcctttgaaaccaaaacggatataactctggtcgccatctttactggcgttatcactcatataatgcatggctttaactttgccatagacatccagtttattaccgtctttattatatatttctgcagcctgtacagatgcagatgccacaatgcccatcaccactaatgccagagtgctctttttcattttcattcctgattttaattaacgcgcgaatattcagcgggagagtcccgttgaaaacaggaaagtttttaacctgagattgttaaagatatattacagattaataatattcttaaaatgtggtaatttattaaatctgtaataaaagcgtaaacaactgccgctaggcttgctgatcccgcgcaacaaaacgccatgctttgctcgcagatggttggcaaccgacgacagtcctgctaaaacgttcgtttgatatcatttttcctaaaattgaatggcagagaatcatgagtgacagccagacgctggtggtaaaactcggcaccagtgtgctaacaggcggaagccgccgtctgaaccgtgcccatatcgttgaacttgttcgccagtgcgcgcagttacatgccgccgggcatcggattgttattgtgacgagcggcgcgatcgccgccggacgtgagcacctgggttacccggaactgccagcgaccatcgccagcaaacaactgctggcggcggtagggcagagtcgactgattcaactgtgggaacagctgtttagcatttatggcattcacgtcgggcaaatgctgctgacccgtgctgatatggaagaccgtgaacgcttcctgaacgcccgcgacaccctgcgagcgttgctcgataacaatatcgttccggtaatcaatgagaacgatgctgtcgctacggcagagattaaggtcggcgataacgataacctttctgcgctggcggcgattcttgcgggtgccgataaactgttgctgctgaccgatcaaaaaggtttgtataccgctgacccgcgcagcaatccgcaggcagaactgattaaagatgtttacggcattgatgacgcactgcgcgcgattgccggtgacagcgttagtggcctcggaactggcggcatgagtaccaaattgcaggccgctgacgtggcttgccgtgcgggtatcgacaccattattgccgcgggcagcaagccgggcgttattggtgatgtgatggaaggcatttccgtcggtacgctgttccatgcccaggcgactccgcttgaaaaccgtaaacgctggattttcggtgcgccgccggcgggtgaaatcacggtagatgaaggggcaactgccgccattctggaacgcggcagctccctgttgccgaaaggcattaaaagcgtgactggcaatttcagccgtggtgaagtcatccgcatttgcaacctcgaaggccgcgatatcgcccacggcgtcagtcgttacaacagcgatgcattacgccgtattgccggacaccacagccaagaaattgatgcaatactgggatatgaatacggcccggttgccgttcaccgtgatgacatgattacccgttaaggagcaggctgatgctggaacaaatgggcattgccgcgaagcaagccagctataaattagcgcaactctccagccgcgaaaaaaatcgcgtgctggaaaaaatcgccgatgaactggaagcacaaagcgaaatcatcctcaacgctaacgcccaggatgttgctgacgcgcgagccaatggccttagcgaagcgatgcttgaccgtctggcactgacgcccgcacggctgaaaggcattgccgacgatgtacgtcaggtgtgcaacctcgccgatccggtggggcaggtaatcgatggcggcgtactggacagcggcctgcgtcttgagcgtcgtcgcgtaccgctgggggttattggcgtgatttatgaagcgcgcccgaacgtgacggttgatgtcgctagcctgtgcctgaaaaccggtaatgcggtgatcctgcgcggtggcaaagaaacgtgtcgcactaacgctgcaacggtggcggtgattcaggacgccctgaaatcctgcggcttaccggcgggtgccgtgcaggcgattgataatcctgaccgtgcgctggtcagtgaaatgctgcgtatggataaatacatcgacatgctgatcccgcgtggtggcgctggtttgcataaactgtgccgtgaacagagcacaatcccggtgatcacaggtggtataggcgtatgccatatttacgttgatgaaagtgtagagatcgctgaagcattaaaagtgatcgtcaacgcgaaaactcagcgtccgagcacatgtaatacggttgaaacgttgctggtgaataaaaacatcgccgatagcttcctgcccgcattaagcaaacaaatggcggaaagcggcgtgacattacacgcagatgcagctgcactggcgcagttgcaggcaggccctgcgaaggtggttgctgttaaagccgaagagtatgacgatgagtttctgagtttagatttgaacgtcaaaatcgtcagcgatcttgacgatgccatcgcccatattcgtgaacacggcacacaacactccgatgcgatcctgacccgcgatatgcgcaacgcccagcgttttgttaacgaagtggatagctccgctgtttacgttaacgcctctacgcgttttaccgacggcggccagtttggtctgggtgcggaagtggcggtaagcacacaaaaactccacgcgcgtggcccaatggggctggaagcactgaccacttacaagtggatcggcattggtgattacaccattcgtgcgtaaataaaaccgggtgatgcaaaagtagccatttgattcacaaggccattgacgcatcgcccggttagttttaaccttgtccaccgtgattcacgttcgtgaacatgtcctttcagggccgatatagctcagttggtagagcagcgcattcgtaatgcgaaggtcgtaggttcgactcctattatcggcaccattaaaatcaaattgttacgtaagatcttatcattctcccaccaaaaaattatcttaatgtaacagctggtgtaagtaaattctatcaacgaagatcaatcttatctactgaccaaaaaggcctgatagggcttcgctcactatacatccttggctgcaggtttagttgtacaccactcctaaatttaatgtgttggcaatgtgttcaataaagctcgaacaaattagctcattatgatcggttaatacttcaacttctggttgcatgattgtttgtccgtaaaaagataacgcgcctgccgggtagtagcaggcgcattacgcaataggtaaacaagggaggaagttcagaaatgtaaatcgggaaggttgtacgcaatgttcatcgtactacgttgttacggctttgccgcaacaagccagttgcctgccgcgctcgcagaatgtctgcagcccggagataaggagattgttcctgccagctaaatcccttcctgtcgatacgaaccagctcgtatttttctaccagaaaattcacggcatcggctagggtgataccggcatcgatagtctgtatcaggaatgttcgggttaaatatcagcaaaaagcccgcatcatgaatactggatatgaagcatgagagttacctcagtgtttatataaggattcggtccccctctctggaacggtaactctcaatctgatcggttcctgcgttagttcacatcacgactcattttttcgctctcaccggcatcccatttgccacaaaatatcccgccgtgctcctcggcagcgcttcctgtccacgaatcatatccgctattttctcgccaatcataattgtcgtggcgttcaaattcccggtgataatctgcggcataatgctcgcatccaccacacgcaggccttctaacccgtgtacgcggccttcgccgtcaaccacggacatctcgtcgtaacccattttgcaggtaccgcacggatggaaggcggtttcggcgtggttacgcacgaactcatcgagctgttcatccgtctggcattcgacaccggggctgatttcgcggccacgatactgatccagcgcgggttgatgcatgatctcgcgggtgatgcgaattgcgtcgcggaactcctgccagtcctgctcgtggctcatgtagttaaacagaatcgccggatgctggtgcgggtcgcgggatttaatccgcacatgcccacggcttgggctgcgcatactgccgacgtggcactggaaaccgtgctctttcactgcattgctgccgttatagttaatcgctactggcaggaaatggtactgaatattcggccacgcaaattcctcacggctgcgaataaatccacctgcttcaaagtggttgctggcaccaacgccagtgccgccaaacagccactccgcaccgattttcggctggttccaccactgcagggcagggtagagggaaaccggttctttgcactcatattgcagatacatctccagatgatcctgaagattttcgccgacgccgggtaattcatgcaccagcggaatatcaaactccgccagcagttcagcgttgccgacgccggagcgttgcaggatctgcggactggcaatcgcgcctgcacataacagcacttctttgttggccgttgcgcgggttgggatggtgctgtcgccttccagccattcgacgcccaccgcgcgtttgccgtcaaaaatgatgtgatcggtcatagcgtgagtacgaatggtcaggttaggacggcttttggcctgatcgagatagccacgcgcggtgctggcgcgacggccctgcggcgtgacggtgcgatccatcggaccaaaaccttcctgctgataaccgttgagatcgtccgtgcgcgggtagcccgcctgcacgcccgcttcaatcatcgcttcaaacagcggattgacgccgggtttggaggtagtgacgctcaccgggccatcaccgccgtgatagtcgttttcacccatatcgcgagtctcggccttgcggtagtagggcaggcagtcgaggtagctccagttctccagaccgggttcttgcgcccagttatcgagatccagcgcattgccacggatgtagcacatgccgttgatcaggctgcttccacccagacctttaccgcgtccgcactccatgcggcggttattcataaacggttcaggttccgtttcataggcccagttgtagcgtttaccctgtagcgggaatgccagggcagcgggcatctgggtgcggaagtcaaagcgatagtccgggccgcccgcttcaagcagcagcacggaggtattcggatcttcagtcagacgggtagcgagaacgttgccggcactgccggcaccaataatgatgtagtcaaattgcaaataaacctcctggttagaatatggactggaatttagccatctcaacctggatggacttcacctgggtgtaactctggagcgtcatcacgccgttctcgcgaccaatgccggagtgtttgtagccgccaacgggcatctctgccggggattcgccccaggtgttgatccagcaaatacccgcttccagctgatgaatgacgcgatgcgcgcggttcaggtccgctgtcacgatgcccgccgccaggccgtagtcggtatcgttagcgcggcgaatgacttcgtcttcgctctcgtaggtcagaatggacatcactggcccgaagatctcttcacgcacgatggtcatatcgtcgctgcaatcggtgaacactgtcggtgcaacccatgcgccgttatcgaagccatcgcctttcagtacatcgccgccgcacagtacgcgcgcgccttcctctttgcctttggcgatatagcgcagcacgttatcgcgatgcgggaagctgaccagcgggccgaagttagtttgcggatcgaaaacgtcgcccgcgcgaatgcgctcaacgcgcgccagaattttctgctcaaatgcggctttgcatttcgccggaacgaagacgcgggtgccattggtacacacctgaccggagctgaagaagtttgccatcatggcgatatcggcggcgagatcgagatccgcatcatcgaaaacgatcagcggacttttaccgcccagttccatggtcacttctttcagggaagaggccgcgctgttagccatcacttttttgccgctggcgacaccgccggtaaaactcactttggcaatgcccggatgctcggtcagatattgcccggtctccgcgcccacgcccggcaacacgttaaatacgccgtccggcaggcccgcttcgctgtaaatttcagccagctttaacgcggtaagcggggtaacttcgctcggtttgaaaatcattgcgttgcctgccgccagcgccggggcggatttccacagggcaatctggatcgggtagttccatgcgccaatccctgccactacgcccagcggttcgcggcgggtatacacaaaggacgtttcacgcaacgggatctggctgccttccagcgccgggatcagcccggcgtagtactccagcacgtccgcaccggtaacgatatcgacggtactggtttcgctatatgcttttccggtgtcgagggtttccagttttgcgagttcgtcattgcgttcacgcagaatatcaacggcccgacgcagaatacggctgcgctccatggcggtcatgctcgcccagattttttgcccctgctgggcgcttttcacggcgcgatcgacatcctcgcgcccggcggcctgcacggtcgccagcacgttaccgttggccgggttaatggtctcgaaggtgcgaccgctggtggcggaggtataaccaccatgtatataaagctgctgttctgccattcgggacatcacgtctcctcggttaatcggtgggtagatgctgagtgataaagtggcgggtcagggaattagcgcgggttttatccagcggtttgccgctcagagccgcgcgcagccataatccatcaatcagcgcggccaggccgtagcccgcttcctgtgcctgttcgcgcggcaattcgcgacgaaactcgctcaccagattgctcagcaagcggcggctgctgacctgctgtaaacgatagagcatcggctgatgcatactgctggcccagaacgccagccaggctttcatcgccgcactgctcacctgcgtttcatcgaagtttccgccaacaatcgcctgtaatcgctgctctgcactgccctgcggaagtgcatgtaatcgattcaaaaccgcgtcacgcagctgactggtgatatcgcgcatggttgcttccagcagaccatttttgtccctgaaatagtggctgatgatccccgtagaaacgcctgcacggcgggcgatctgcgcgatcgttgcatcgtgcatgcccacttcatttattgcttccagtgtggcgtcgatcagttgtctgcgccggatgctctgcatccccaatttgggcattttcgccactccattcatcagcggtgtttatctattaaagcggttattgattggacgttcaatataaaatgtgtcttaattgttacgaatttgattttaaatagtaacaataacagtggggatactggatgacagaccttagtcacagcagggaaaaggacaaaatcaatccggtggtgttttacacctccgccggactgattttgttgttttccctgacaacgatcctgtttcgcgacttcagcgccctgtggattggccgcacgctggactgggtttctaaaaccttcggttggtactatctgctggcggcaacgctctatattgtctttgtggtctgtatcgcttgtagccgttttggtagcgtgaagctcgggccagaacaatccaaaccggaattcagcctgctgagttgggcggcgatgctgtttgctgccgggatcggtatcgacctgatgttcttctccgtagccgaaccggtaacgcagtatatgcagccgccggaaggcgcgggacagacgattgaggccgcgcgtcaggcgatggtctggacgctgtttcactacggcttaaccggctggagcatgtatgcgctgatgggcatggcgctcggatactttagctatcgttataatttgccgctcaccatccgcagcgcgctgtacccgatcttcggtaaacggattaacgggccgataggtcacagtgtggatattgcagcggtgatcggcactatcttcggtattgccactacgctcggtatcggtgtggtgcagcttaactatggcttgagcgtactgtttgatattcccgatagcatggcggcgaaagcggcactgatcgccttgagcgtgataatcgccacgatctctgtcacctccggtgtcgataagggcattcgcgtgttaagcgagcttaatgtcgcgctggcgctgggattgatcctgttcgtattgtttatgggcgacactagcttcctgcttaatgcactggtgctgaatgttggcgactatgtgaatcgctttatgggcatgacgctcaacagttttgccttcgaccgtccggttgagtggatgaataactggacgctcttcttctgggcatggtgggtggcatggagcccgtttgtcggcttgttcctggcgcgtatcagccgtgggcgtaccattcgccagttcgtgctgggcacgttgattattccgtttaccttcacgctgttatggctcagcgtgttcggcaatagcgcgctgtatgaaatcatccacggcggcgcggcatttgccgaggaagcgatggtccatccggagcgcggcttctacagcctgctggcgcagtatccggcgtttacctttagcgcctccgtcgccaccattactggcctgctgttttatgtgaccagcgcggactccggggcgctggtgctggggaatttcaccagccagcttaaagatatcaacagcgacgcccccggctggctgcgcgtcttctggagcgtggcgattggcctgctgacgctcggcatgctgatgactaacgggatatccgcgctgcaaaacaccacggtgattatggggctgccgttcagctttgtgatcttcttcgtgatggcggggttgtataaatctctgaaggtagaagattaccgccgtgaaagtgccaaccgcgataccgcaccgcgaccgctggggcttcaggatcgcctgagctggaaaaaacgtctcagccgcctgatgaattatccgggcacgcgttacactaaacagatgatggagacggtctgttacccggcaatggaagaagtggcgcaggagttgcggttgcgcggcgcgtacgtggagctaaaaagcctgccaccggaagagggacagcagttgggtcatctggatttgttggtgcatatgggcgaagagcaaaactttgtctatcagatttggccgcagcaatatagcgtgccgggctttacctaccgcgcacgcagcggtaaaagcacctactaccggctggaaaccttcctgttagaaggcagccagggcaacgacctgatggactacagcaaagagcaggtgatcaccgatattcttgaccagtacgagcggcaccttaactttattcatctccatcgtgaagcgccgggccatagcgtgatgttcccggacgcgtgattgttattgcataaaaccgcgccatgtctgcatatggcgctgtttctcctacctcttgatacgttatatctatacggttaagcccttagtatctattgatgattaccagacaacagataataaaaaagaaaagaactattgcagcccaaaacctacatttgggctgttgcgaatgttcaataagtttagtcttatttaatgtaaatattgctgatcatttgaaatgacgcattattcatgagaaatgtgtatcgtaaatcaactgaaattaacgcaaccatttgttatttaaggtttaattatctgtgtgtgatattttattgaatgttttaaatattgtttttattggcattgctataatattggttatcatttgctgaatggattcagtcttaatgagtgggtttttaagggacaggcatagagtaatgatacgtatgcataaccaacatctttactcattatgtcattgaatgttgacgctatgtgtttatgagggagaggtattttcagttgatctggattgttaaattcatataatgcgcctttgctcatgaatggatgccagtatgtagtgggaaattataaatattgaaatagtccaactacttctttattaccaaaaatgagtatctgaattttaatattgcattcttgcgtgattatctcctgagtttgacttgtgattacctttttaaggtatttagcgtaactgtttttgagcgagcatcagaggtaaagataatcttcttgatagtgatgtgggatgttatacgtatggcatcgctgatgtttatggttaccccttatgtgtgctcaggaatcgacaggtaatcactcatactgaacagcgataaaagataaaggtgtgttcatgaatagttgtgattttcgtgtttttctgcaagagttcggtacaacggttcatttgagtttgcctggtagcgtatccgagaaagaacgactgctactcaagctgctgatgcagggaatgtctgtaacagaaataagtcagtacagaaatcgcagtgcaaagacaattagtcatcaaaagaaacagctctttgagaaactggggattcagagcgatattactttctggcgcgatattttctttcagtacaatccggagatcatatccgccacggggagtaatagtcacagatatattaatgataatcactatcaccatatcgtcacgcctgaagccatcagtctggcgttggaaaaccacgaattcaaaccgtggatccaaccggttttctgcgcgcagactggcgtactgacgggctgtgaggtgcttgtccgctgggaacatccacaaacgggaattatcccaccggatcagtttattcctctggcggagagttccggtcttattgtcataatgacccgccaactgatgaaacagactgcggatattctgatgccggtaaaacatttgctgccggacaatttccatattggcatcaacgtcagcgcgggttgttttttggcagcgggatttgaaaaagagtgtctgaacctggttaataaattaggtaacgataaaatcaagctggttctcgagctaacggaacgtaaccctattccggtaacgccagaagccagagcgatatttgacagccttcatcagcacaacattacctttgcgctggatgactttggtacgggttatgcgacctatcgttacttgcaggcgttcccggtcgattttattaagatcgataagagttttgtgcaaatggcgagtgtcgacgaaatctccggtcatattgtggacaatattgtcgaactagcgcgtaagcctggtctgagtatcgtggcggaaggggtagaaacccaggagcaggcggatttaatgatcggtaaaggcgttcactttttgcagggctatttgtactctccgccagtaccgggtaataaatttatctctgaatgggtaatgaaagcaggtggttgatgtaaaccgctattcacagcgcatcgggaggttggcagcgattaattctcccgatgcagtaaatcctgatagatccccgttaatatgccatttggcgcaaattgttttttaatccactgcgtcacctgacccgtagcagaatgctgagtcgccagtaacatgcggctatcctggcgcggattatggatttgtcgggtaaccagcagggattgcgtcatcgcctcacggaccatgtaatccggcaaaaaaccaattccttcacctaaaatctggcactgacatttggtgttgaaatctggcaccagaatactctcctgcccgtgcagcaaccagcccacttttttattaatcgtatgcgcggtgtcctccaccataatattagggtagagacgcagttggctttcggcgatgggttccggcacaaaggctaacgggtgatccggggcgatagcaaaagcccagcgaatcgcgccaatttcagtgtaatcaataccgccgccgtccagtagtgtatcgggtgcgccgatggcgatattggcctgattattaataatcgcatcccagacgccgttatacacttcggtggtgacggtaatctggcaggtaggaaactgctttttcagcacctgtaacaagcgtgcggtgtgtttgggcgtataaagcagctgattaatacaaatgcgcacacgcgcttctatgccctggctaatagtatcgattctgcgtttgatggcataaaaatcattcagcaggtcggtagctttgcggaaaaaataacgcccggactccgttaactcaatgctgcgggtactgcgagtgaacagcaccacatccagccccgtctccatacgcttaatggtgtagctaatggcggaagtggttaaacccaactcttctgcggctttactgaagctgccaaaacgcgcagcggtagtaaatgccaacagattctcttcggtaaaaatactgttcattaaaccattctcgccattatctactatgaatttctccagctatgactgtagaggtatcggttaaagatagataatcatttttgaataacttttaatacccgtcgcgtttagtcgtcgcttcgcttaatttttgtccaccatattcactaattacccccacgcagttacccgccagaaaacccagtaacgtcaccgtccagttcatcccgctggcaaaaaacagcgtcatgccgagaaagccaccgggaataaaggacagtaaccagaaacgcccttgccagaccactaccgcgctgaagggtacggtagtaattacgctcgcccagaacgcggacagtccacttacagaggccagccaaccagcagtcagcgcggcgaaaaacgcccacaccatcccggaataattaaccgccagacttctgataaacccgcttttaccgccgcctgcggcataaaaactgcaaaaggcgacgaagccaatggttcctaataattcccatccttgagagagcccgacatgactagacactaactgccaaagccctgcacaaataccgacggtgacacccgttgccgtgagtccgttcatcttgttcccctctggttagacatggacgaaagctactcttacatgtgcagactatagagaaataaaacctgattgagtgaaagggtatcgggtcaaagaaacaaatattgcactaccgcacactgcgaaaagattgttgaatattattcaacaaaaaggcgagatacggcgaattaaatttaagcgggttcttttatcagattatcgttgctattctcaattcatcgaaaacagccacaaaaaccaggggaatgtgaatgagtataaaaaatctacctgccgactatttattggctgcacaacagggtgatatcgataaagtaaaaacctgccttgcgctgggtgtcgatattaatacctgcgatcgtcaggggaaaacggcaattacgctggcaagtttatatcagcaatatgcttgcgttcaggcattaattgatgccggagcggatattaataagcaagattatacctgtttaaatccttttttaattagctgtctgaacgatgatttaacgctactacgaattattttaccggctaaacccgatcttaattgcgtaacccgttttggcggtgtcggcctgacgcctgcctgtgaaaaaggccatttaagtattgtaaaagagcttttggcgcatacggagattaacgttaaccagaccaaccatgtaggctggacgccgctactggaagcgattgtgcttaatgatggtggtattaaacagcaggcgattgtgcagttattgctggaacacggtgccagcccgcatctgaccgataaatatggcaaaacgccactggaactggcgcgggaacggggctttgaagagattgcgcagttactgattgccgcaggtgcataaaccgggaggcttgctatcaacacaccagaaagacggtgtgtgtgggcgctaactgcggatgcggattttctggcgcagcgggggcaaggacaggttgaacaggtctttgccagagcggtaaatatcgcactcccggctcgccagcagttgctgacgctgctttgtgaagagtacgacaatgcgccaaacagttgtcggttggcactcactcactttgatgatctgttccggcatggtgataaggttcagtttgacgatcaaggtattacggttggtcaacatcttcatatagagatgagtcgttgtcggcgttggctgtccccaaccttgcaaatgaccgctgtgaattttcaccttatcgcctggctacagtggcacgacattattcatcagcacctgggggaaaatgaaaccctgtttaattatcgcggcgataatccgttttatcaggcgttaaataaagaattacatattaaacgacgggcagttattcaggccgtaaacgataaacaaaatatcgccagtgcggtcgccagtatgatggggttagggattggccttacgccaagtgccgacgattatttaacaggtctggcgcttattttatttattcccgggcatccggcggaaaaatacaaagaggaattttatctcggtctgcaacgcggcaaaaataataccacattattaagtgccataacgctggaagccgcattacaacaacgctgccgggaaaatattcatcgttttattcacaacattatttatgacatccctgggaacgcaactcaggcaatagaaaaaattaaacatattggctccagttccggctgcgacatgctgtatggcatggccgatggttgtgcgctgagccaaacctacggagggaattatgtcagttaattaaccaaacctacggagggaattatgagtgttaaaatagtcattaaaccgaatacctattttgattctgtcagcctgatgtctatctccacgcgtgcaaataaactcgacggcgtcgagcaggcatttgtggcgatggcgaccgaaatgaataaaggcgtgctgaagaatttaggactgctgacgccggagctggagcaggcgaaaaacggcgacctgatgattgtcatcaatggtaaaagcggtgcggacaacgagcagttactggtggagattgaagaactgttcaacaccaaagcgcaaagcggcagccacgaggcgcgttacgccactattggcagcgccaaaaagcatatcccggaaagtaacctggcggtgattagcgtcaacggtctgtttgccgctcgcgaagcgcgtcaggcgctgcaaaacgatctcaacgtgatgctgttttccgataacgtcagtgttgaagatgaactggcgctcaagcaactggcccacgaaaaagggctgctgatgatggggccagactgtggcacggcgattatcaacggcgcggcgctctgttttggtaacgccgtgcgtcgcggcaacatcggtattgttggcgcatccggcaccggcagtcaggagttgagcgtccgcattcatgaatttggcggcggcgttagccaactgattggcaccggcgggcgcgacctgagcgagaaaatcggcggcctgatgatgctcgacgccatcgggatgctggaaaacgatccgcaaactgaaatcattgcgcttatctccaaaccgcctgcgcctgcggtggcccgcaaagtgctggaacgtgcgcgcgcctgccgcaagccggtggtcgtctgcttcctcgatcgtggcgaaacgccagtggatgagcaggggctacagtttgcccgcggcaccaaagaggcagcgctaaaagcggtgatgctctccggcgtgaaacaggaaaatctcgacctgcatacgcttaaccagccgttgattgcggatgtgcgtgcgcgtctgcaaccgcagcagaaatacattcgtggcctgttctgcggcggcacgctgtgcgacgaaaccatgttcgcggtgatggaaaaacatggcgatgtctacagcaacattcagcccgatccggaattccgcctgaaagatatcaaccgcagcatcaaacacaccttcctcgactttggcgatgacgacttcaccaatggcaagccgcacccgatgattgaccccaccaaccgcatcagtcgcttgatcgaagaggcgcgcgatccagaagtggcggtgatcgtgatggattttgtgctcggatttggaagccatgaagatccggtcggctccaccatcgagacgatcaaagaagcgaaagcgatcgccgctgccgaaggacgcgagttgatcattctcgcctatgtgctgggtaccgatcttgatacgccaagcttagaacaacaaagccagatgctgcttgatgccggagtgattctggcgagcagcagcaccaataccggattgctggcgcgtgaatttatctgcaaaggggaggaagcctgatgagccagagtctgtttagccaaccattgaacgttattaacgtcggcatcgccatgtttagcgatgacctgaaaaagcagcatgtagaagtgactcaactcgactggacgccgccggggcagggcaatatgcaggtggtgcaggcgctggataacattgccgatagcccgctggcggacaaaatcgccgccgctaaccagcaggcgctggagcgtattatccagagccatccggtgctgattggttttgatcaggcgattaacgtggtgccgggcatgacggcgaaaaccattcttcacgccgggccgccgatcacctgggaaaaaatgtgcggcgcgatgaaaggcgcggtcaccggagcgctggtgttcgaaggactggcgaaagatctcgacgaggcggctgaactggcggcttccggggagatcaccttcagcccgtgtcacgagcacgactgcgtgggaagcatggcgggtgttaccagcgccagcatgtttatgcacatcgtaaaaaacaaaacctacggcaacatcgcttataccaacatgagcgagcagatggcgaagattttgcgtatgggcgctaacgaccagagcgtgattgaccgcctgaactggatgcgtgatgtgcagggaccaatactgcgcgacgcgatgaaaattatcggcgaaatcgatctgcgcttaatgctggcgcaggcgctgcatatgggcgatgagtgccataaccgcaataacgccgggacgacactgctgattcaggcgctgacgccggggattattcaggcgggttattccgtcgagcaacagcgcgaagtgtttgagtttgtcgccagcagcgactacttctccggcccgacgtggatggcgatgtgtaaagcggcgatggatgcggcgcatggcatcgaatacagcaccgtggtcaccaccatggcgcgtaacggcgtcgagttcggcctgcgggtcagcggcctgccggggcaatggtttaccggcccggcgcagcaggtgatcggcccgatgtttgccggttataagccggaagatagcgggctggatatcggcgacagcgccatcaccgaaacctacggtattggcggatttgctatggcgaccgcgcccgctatcgtcgcgctggtgggcggcacggtggaagaagctattgatttctcccgtcagatgcgcgaaatcaccctcggtgaaaaccccaacgtcaccattccgctgctcggttttatgggcgtgccgagcgcaatcgacatcacccgcgtgggtagcagcggcattctgccggtgatcaacaccgccatcgcccataaagatgcgggcgtcggcatgattggcgcgggcattgtgcatccaccttttgcctgcttcgagaaagccattcttggctggtgcgaacgttacggcgtctgacctacatgttcatgccggatgcggcgtgaacgccttatccggcctacgaatggcgcaagaatctgtaggcctgataagcgtagcgcatcaggcatttgtcaccattgccggatgcggcgtgaacgccttatccggcctacgaatggcgcaagaatctgtaggcctgataagcgtagcgcatcaggcatttgccaccactgccggatgcggcgtggacgccttatccggcctacgagtggcgcgagaatctgtaggcctgataagcgtagcgcatcaggcatttgtcaccattgccggatgcggcgtgaacgccttatccggcctacgagtggcgcgagaattgtaagcctgataagcgtagcgcatcaggcagtctggcgttggtcataaccccatcaccctctgtagcggacataacaacatgaaagagcttgtggtcgttgccattggtggcaacagcattatcaaagataacgccagccagagcattgagcatcaggcggaggcggtgaaagccgtcgccgatacggtgctggaaatgctggcttccgattacgacattgtgctgacccacggcaacgggccgcaggtcgggctggatttacgccgtgcggagattgcccacaagcgcgaagggctgcccttaacgccgctggcgaactgtgtggcagatacgcagggcggcatcggctatctgatccaacaggcgctgaataaccggctggcgcgtcacggcgagaagaaagccgtcaccgtggtgactcaggtggaagtggataaaaacgatccaggttttgcccatcccaccaagcccatcggcgcattctttagtgacagccagcgtgacgaattacaaaaggcaaaccctgactggtgttttgttgaagatgccgggcggggctatcgccgcgtggtcgccagcccggaaccgaaacgtattgtcgaagcacctgccattaaagcgctgatccaacaaggttttgtcgtaattggcgcgggcggcggtggaattccggtagtgcgtactgacgcgggagattaccaaagcgtggacgcggttatcgacaaagatctctctaccgcgctgctggcccgtgaaattcacgccgacattcttgtgatcaccactggcgtcgaaaaagtgtgtattcactttggcaaaccgcagcagcaggcgctcgatcgggtggatattgccaccatgacccgctatatgcaggaagggcatttcccgcccggcagcatgttgccaaaaatcatcgccagcctgacatttttagaacaaggcggcaaagaagtgattatcaccacgccggaatgcctgcctgcggcgctgcgcggcgaaacgggcactcatattattaaaacgtaaggacgtaagatgaaagaaagcaatagccgccgtgaatttctgagccagagcggtaagatggtcaccgccgccgcgctgtttggtacctctgtgccgctcgcccatgcggcggtagctggcaccctaaactgcgaagcgaacaacaccatgaaaatcactgacccgcattactatctcgataacgtgctgctggaaaccggttttgactacgaaaatggcgtggcggtgcagacccgcacggcgcgccagaccgtggagattcaggacggcaaaattgtcgccctgcgcgagaacaagctgcatccggacgccacgctgccgcactatgacgctggcggtaagctgatgctgcccaccacccgcgacatgcatattcatctcgacaaaaccttttacggcgggccgtggcgcagcctcaatcgtccggcaggcaccaccatccaggacatgatcaaactcgagcagaaaatgctgccggaactgcaaccgtacactcaggagcgggcagaaaaactgattgatttattgcagagcaaaggcaccaccattgcccgcagccactgcaatatcgaaccggtttccggcctgaaaaatctgcaaaatttgcaggcggtgctggcgcgacgtcaggcgggctttgagtgtgaaatcgtcgccttcccgcagcacggtttgctgctgagcaaatctgaacctttaatgcgtgaagcgatgcaggcgggggcgcattacgtcggcggcctggacccgaccagtgttgatggcgcgatggaaaaatccctcgacaccatgttccagattgcgctggactacgacaaaggcgtcgatattcacctgcacgaaaccactccggcaggcgtggcagccatcaattatatggttgaaacggtagagaaaacgccacagctgaagggcaagctgaccatcagtcacgcctttgcgctggcaacgctcaacgagcaacaggtagatgaactggcgaaccggatggtggtgcaacaaatttctatcgccagcacggtgccgattggcacgctgcatatgccgctcaaacagttgcacgacaaaggcgtaaaagtgatgactggcactgacagcgttatcgaccactggagcccttatggtctgggcgacatgctggaaaaagccaatctgtacgcgcagctctatattcgtcctaacgaacagaacctctcccgcagcctgtttttagccactggcgatgtattgccgctgaatgaaaaaggcgagcgtgtatggccaaaagcgcaggatgacgccagctttgtgctggtggacgcctcctgttccgccgaggcggtggcgcgtatcagcccgagaaccgcaacgttccataaagggcaactggtgtgggggagtgtggcaggttgatgcgcatttgaaacgcctgcaacggtgaatagtaagagatttaagccccagggagtggggcaatctgaatatgagtgtgtcggcagaaatggacattatctttgaggaatatgcccttattgacgttgtgtagataactatttgtctacgtgaaaagatcatcagttttgccgattttagtcttttacagatagcaaatatcacacttacaggcgctcgccttatggggaacgttgctgctctgtttcattcaggctcgcggcatgttggggctggatcgggtggtttaaatattggctatattcaatggacgcgttttgccgcgatgacatatcaggcgttgccaaatacacatagctaatcaggagtaaacacaatgaagatcaaagctgttggtgcatattccgctaaacaaccacttgaaccgatggatatcacccggcgtgaaccgggaccgaatgatgtcaaaatcgaaatcgcttactgtggcgtttgccattccgatctccaccaggtccgttccgagtgggcggggacggtttacccctgcgtgccgggtcatgaaattgtggggcgtgtggtagccgttggtgatcaggtagaaaaatatgcgccgggcgatctggtcggtgtcggctgcattgtcgacagttgtaaacattgcgaagagtgtgaagacgggttggaaaactactgtgatcacatgaccggcacctataacagcccgacgccggacgaaccgggccatactctgggcggctacagtcaacagatcgtcgttcatgagcgatatgttctgcgtattcgtcacccgcaagagcagctggcggcggtggctcctttgttgtgtgcagggatcaccacgtatagcccgctacgtcactggcaggccgggccgggtaaaaaagtgggcgtggtcggcatcggcggtctgggacatatggggattaagctggcccacgcgatgggggcacatgtggtggcatttaccacttctgaggcaaaacgcgaagcggcaaaagccctgggggccgatgaagttgttaacagtcgcaatgccgatgagatggcggctcatctgaagagtttcgatttcattttgaatacagtagctgcgccacataatctcgacgattttaccaccttgctgaagcgtgatggcaccatgacgctggttggtgcgcctgcgacaccgcataaaagcccggaagttttcaacctgatcatgaaacgccgtgcgatagccggttctatgattggcggcattccagaaactcaggagatgctcgatttttgcgccgaacatggcatcgtggctgatatagagatgattcgggccgatcaaattaatgaagcctatgagcgaatgctgcgcggtgatgtgaaatatcgttttgttatcgataatcgcacactaacagactgaaaaaattaataaataccctgtggtttaacatattaacttcgctctccacttaactttttagttaaggagagcgaaataatatcaaagtagcagtaaaacctataacgtaaatttaaattgttaaattaacgccctccagtacacaatacttcacacgttagttatgagcgatttctgatagtgcctggtttaatcagagctttattatctgcgacgtttatttttatttaagagagatcgcgatgataagtttaaaagctccgcacaataatttgatgccatatacgcaacaaagcatacttaatacggttaaaaacaatcagttaccagaggatatcaaaagctccctggtttcctgtgtcgatatattcaaggttttgattaaacaatattatgattatccttatgattgtcgtgatgatttagtcgatgacgacaaactcattcatctcatggctgccgtacgagactgtgagtggagtgacgataacgcactcaccataaatgtgcagtttaatgatttccctggattttatgactggatggattaccctgatcacccggttaagtttgtttttcacatacttgaaaatcaaaaagggacagtttgggtatatgaccaggatgatgcgtttcttgatattaaagcaaacgtgcaggctggacgctttaccgggcttaagaaattagtgcagtttatcgatagtgtgcgaacagattgcaaatgtattcttcttgaataccatatgcctttgctgagaattttccctaaagggaaagagtgtatgcatgtggaaaaatggcttcgcgaaatgagctctattccggagacagacgcgcccattaagcaggcgcttgcgcatggattattattacacttaaaaaatatctaccctgtttttcctgaaagtctggtgatgttattgctctctgttctggacgtaaaaacatacagagatgatgcgcgattaaatgaatggatatctaatagagtgcaggaattaggtgacagatattatcctgtaaataagcacgttaaaatccgctacactctttaattcagaaagggttccacctgcaagttgttattccacctgagagtgaatcgcaatgcaggtaatcatttcatctgtatatctgtatgccaactggcattccatctcttttttcgccgatattttgttgtgatcggcgacacttcgcttaaaaaagcaccagtagtggtttcgcagccatgcggtgtataaaaaatgatctcatgcagatgttttgtgaatgtgttggttgacattcatatgaaaaaaatcataattccatcatgtttgtgtggggtcttttctgtatcttacgcatcgcactcaagcctgacagaaaatatgctgtaaggctcatatcaaaaaccgccattagctcatcaggaagagcagacgacaaccaggattgttgtatggtacggggttcgaggcctcgatggcggtccaacttttcaaaactcttctgaatcagatccccttattaagttccctgcaaagtggaacattgccattgtttggctatagtggatggggcagaccaatgaaaaaagcccacacaggggagagtgggctgaaatgggaggctaaagacagtagtaaacttatcggaaataaggaccacgcattacgggggctaagtagcccgatggccgtgattcggcaaatcaggttgattacgtaaagagtaaattatctgctcaccgctgcgtcaccccttcgtaaatcaggcgtagcgcgaatacaccaataattgcaccaataacccgactggcaacgcgttgcatacgcccataagcacgacgcacagcgggcaaagaaaacgcctgactaagaaaaactcgccagataatacttgcgagcacaatccccgcccaggccattaaacgtgcccatgttggtgtttctgcatttaatgttacactgaaaatactgataaaaaataaaacggtttgcgggttagagagatcggtaattaatccgcggcgaaaaaagacataccagggggcgctaatcggttgttgtagtgtgctcatttgcggtgtactctggcggcgcatgctgcaccacgcaaaccataagagataagcgccgccgacgattctgataaggctaaaaatctcctcacactgcgtaattagcgttgcaagaccaaacaaacccaacccggaataaaatgcatcgcccagcgccacgcccagcccggtcagcacccctgcgcgtcgaccggaagccaggctggtttgtactaccacaaagagattggctcccggattaaaaaaagtaatcacgaacagtcctacggtcaggtaaacggcatgcaaaggatccatagtgatttcatccataaataagtgaactaactgcatcatatttctaccaaaaataatcgggtgcgagagagatcacaaagtgtcttatttccggttactggcgtttatgccctgactgaactaattattaatcaacccaataatgtgggtgggtgatagtgtgataacaactctggagccgtaatatgaaaataatctctaaaatgttagtcggtgcgttagcgttagccgttaccaatgtctatgccgctgaattgatgaccaaagcggaatttgaaaaagttgaaagccagtatgaaaaaataggtgatattagtaccagcaatgaaatgagcactgcagatgcaaaagaagatttgatcaaaaaagcggatgaaaaaggggctgatgtgttggtactgacctccggtcaaactgacaataagatccacggcacggcaaatatttataagaagaagtaattctgaatcctatgtaaacatctccgatgcgtaagtttatcggtgatcatctattgaaatttatgccggataaagcgttcgcgctgcattcggcagttcagcttttcagccgccgccagaacgtcgtccggctgatgcctaaataattcgccgctgctgttttatcgccattaaatttctccagtgcctgttgtggtgtcagtaagcgtggagcgggagttttcgcgctctcgcgcgccagttccggcagtagcagttgcataaactgcggcgttaaatccggcgtcggttccacacttaaaaacagcgccagtcgttccatcatattgcgcagttcacgaatattgcctggccagtcgtagtgcagcagcacagtttcacttgcctgtaacccctggcgtaatgcagcagaaaatggggcggagagcgccgccagagacactttcaaaaagctttccgccagcggaagaatatccgccacccgctcgcgcagtggtggcaattgcagacgcaaaatactcagccgataaaacagatcacggcgaaaacgtccttgctgcatatcttcttccagattgcagtgagtggcgctaatgacccgtacatctaccggaacaggctgatgcccgccgacgcgggtgacctctttttcttccagcacccgcagcagccgggtctgcaaaggtagcggcatttcgccaatctcatccagaaacagcgtaccgccgtgggcaatttcgaacagcccggcgcgacctccgcgtcggctgccggtaaacgccccttcctcatagccaaacagttctgcttccagcaggctttcggcaatcgccccgcagttgacggcaacaaacggatggctctttttgccctgtcgcgcatcgtggcgggcaaaatattcccgatgaatcgcctgggccgccagctctttgcccgtccccgtttccccctcaatcaacaccgccgcactggagcgggcatacagcaaaatagtctgccgtacttgttccatctgtggactttgaccgagcatatcgcccagcacgtaacgagtacgcagggcgttgcgggtggcatcgtgagtgttatggcgtaagctcatgcgcgtcatatccagcgcatcgctgaacgcctggcgcacggtggcggcggaatagataaaaattccggtcattccggcttcttctgccaaatcggtaatcagccctgcgccgaccaccgcttcggtgccgttagcttttagctcgttaatctgcccgcgtgcgtcttcctcggtaatgtagctacgttggtcgaggcgcaaattaaaggttttttgaaacgccaccagcgctggaatggtttcctgataggtgacaacgccgatagaagaggtgagttttccggcttttgccagtgcctgtaacacatcgtagccgctcggtttaatcaaaataactggcacactcaggcggcttttcaggtacgcgccgttagagccagccgcgatgatggcgtcacagcgttcgtttgccagtttcttgcggatgtaggtcactgctttttcaaagccaagctgaataggggtaatgttcgccaggtgatcaaactcgaggctgatatcgcgaaacagctcgaacaggcgcgttacagataccgtccagataaccggtttgtcgtcattaagccgtggtggatgtgccatagcgcaccgcaaagttaagaaaccgaatattgggtttagtcttgtttcataattgttgcaatgaaacgcggtgaaacattgcctgaaacgttaactgaaacgcatatttgcggattagttcatgactttatctctaacaaattgaaattaaacatttaattttattaaggcaattgtggcacaccccttgctttgtctttatcaacgcaaataacaagttgataacaaaggatgggctatgtctctacactctccaggtaaagcgtttcgcgctgcactgactaaagaaaatccattgcagattgttggcaccatcaacgctaatcatgcgctgttggcgcagcgtgccggatatcaggcaatttatctttctggcggtggcgtggcggcaggtagcctggggctgcccgatctcggtatttctacccttgatgatgtgctgaccgacattcgccgtatcaccgacgtttgtagcctgccgctgctggtggatgcggatatcggttttggttctagcgcctttaacgtggcgcgcaccgtgaaaagcatgattaaagccggtgcggcaggattgcatattgaagatcaggttggtgcgaaacgctgcggtcatcgtccgaataaagcgatcgtcagcaaagaagagatggtggatcggatccgcgcggcggtggatgcgaaaaccgatcctgattttgtgatcatggcgcgcaccgatgctctggcggtagaggggctggatgcggcgatcgagcgtgcgcaggcctatgttgaagcgggtgccgagatgttgttcccggaggcgattaccgaactcgccatgtaccgccagtttgccgatgcggtgcaggtgccgatcctcgccaacatcaccgaatttggtgccacgccgctgtttaccaccgacgaattacgcagcgcccatgtcgcaatggcgctgtacccacttagtgcgttccgcgccatgaaccgcgccgctgaacatgtctacaacgtcctgcgccaggaaggcacgcagaaaagcgtcatcgacaccatgcagacccgcaacgagctgtacgaaagcatcaactactaccagtacgaagagaagctcgacaacctgtttgcccgtagccaggtgaaataaaaaacgcccgttgattgtattcgacagccgatgcctgatgcgtcgctgacgcgacttatcaggcctacgaggtgcactgaactgtaggtcggataagacggatggcgtcgcatccgacaaccgatgcctgatgcgccgctgacgtgacttatcaggcctacggggtgcactgaactgtaggtcggataagacgcatagcgtcgcatccgacaaccgatgcctgatgcgccgctgacgcgacttatcaggcctacggggtgcactgaactgtaggtcggataagacgcatagcgtcgcatccgacaaccgatgcctgatgcgccgctgacgcgacttatcaggcctacggggtgaactgaactgtaggtcggataagacgcatagcgtcgcatccgacaacaatctcgaccctacaaatgataacaatgacgaggacaacatgagcgacacaacgatcctgcaaaacagtacccatgtcattaaaccgaaaaaatctgtggcactttctggcgttccggcgggcaatacggcgctctgcaccgtgggtaaaagtggcaatgacctgcattaccgcggctacgatattcttgatctggcgaaacattgcgaatttgaagaagtggcgcatctgctgatccacggcaaactgccgacccgtgacgaactcgccgcttacaaaacgaaactgaaagccctgcgcggtttaccggctaacgtgcgtaccgtgctggaagccttaccggcggcgagccacccgatggatgttatgcgcaccggtgtttccgcgctcggctgcacgctgccagaaaaagaggggcataccgtctctggcgcgcgggatattgccgacaaactgctggcgagccttagcagcattctcctttattggtatcactacagccacaacggcgaacgcatccaaccggaaaccgatgacgactccatcggcggtcacttcctgcatctgctgcacggcgaaaagccaagccaaagctgggaaaaggcgatgcatatcagcctggtgctgtacgccgaacacgagtttaacgcctccacctttaccagtcgggtgattgcgggcaccggctctgatatgtattccgcgattattggcgcgattggcgcactgcgcgggccaaaacacggcggggcgaatgaagtgagcctggagatccagcaacgctacgaaacgccggacgaagccgaagcagatatccgcaagcgcgtggaaaacaaagaagtggtcattggttttggtcatccggtttacaccatcgctgacccgcgccaccaggtgattaaacgtgtggcgaagcagctcagccaggaaggcggcagcctgaagatgtacaacatcgccgatcgcctggaaacggtgatgtgggagagcaaaaagatgttccccaatctcgactggttctctgctgtttcctacaacatgatgggcgttcccaccgagatgttcacaccactgtttgttatcgcccgcgtcaccggctgggcggcgcacattatcgaacaacgtcaggacaacaaaattatccgtccttccgccaattatgttggaccggaagaccgcccgtttgtcgcgctggataagcgccagtaaacctctacgaataacaataaggaaacgtacccaatgagtgctcaaatcaacaacatccgcccggaatttgatcgtgaaatcgttgatatcgtcgattacgtcatgaactacgaaatcagctctaaagtggcctacgacaccgcacattactgcctgctcgacacgctcggctgcggtctggaagctctcgaatacccggcctgtaaaaaactgctggggccaattgttcccggcaccgtcgtacccaacggcgtgcgcgtccccggaactcagttccagctcgaccccgtccaggcggcatttaacatcggcgcgatgatccgctggctcgatttcaacgatacctggctggcggcggagtggggccatccttccgacaacctcggcggcattctggcaacggcggactggcttagccgcaacgcggtcgccagcggcaaagcgccgttgaccatgaaacaggtgctgaccgcaatgatcaaagcccatgaaattcagggctgcatcgcgctggaaaactcctttaaccgcgtcggcctcgaccacgttctgttagtgaaagtggcttccaccgccgtggtcgccgaaatgctcggcctgacccgcgaggaaattctcaacgccgttagcctggcgtgggtggacggtcagagcctgcgcacctatcgccatgcgccgaacaccggcacgcgtaaatcctgggcggcgggcgatgccacttcccgcgcggtacgtctggcactgatggcgaaaacgggcgaaatgggttacccgagtgccctgactgcgccggtgtggggcttctacgacgtctcctttaaaggtgaaagcttccgcttccagcgcccgtacggttcctacgttatggaaaatgtgctgttcaaaatctccttcccggcggagttccactcccagacggcagttgaagcagcgatgacgctctatgaacagatgcaggcagcaggcaaaacggcggcggatatcgaaaaagtgaccattcgcacccacgaagcctgtattcgcatcatcgacaaaaaagggccgctcaataacccggcagaccgcgatcactgcattcagtacatggtggcgatcccgctgctattcgggcgcttaacggcggcagattacgaggacaacgttgcgcaagataaacgcattgacgccctgcgcgagaagatcaattgctttgaagatccggcatttaccgctgactaccacgacccggaaaaacgcgccatcgccaatgccattacccttgagttcaccgacggcacacgatttgaagaagtggtggtggagtaccccattggtcatgctcgccgccgtcaggatggtattccgaaactggtcgataaattcaaaatcaatctcgcgcgccagttcccgactcgccaacagcagcgcattctggaggtttctctcgacagagctcgcctggaacagatgccggtcaatgagtatctcgacctgtacgtcatttaagtaaacggcggtaaggcgtaagttcaacaggagagcattatgtcttttagcgaattttatcagcgtagcattaacgaaccggagcagttctgggccgagcaggcccggcgtattgactggcagacgccctttacgcaaacgctcgatcacagcaatccgccgtttgcccgttggttttgtgaaggccgaaccaacttgtgccacaacgccatcgaccgctggctggagaaacagccagaggcgctggcgctgattgccgtctctagcgaaacagaagaagagcgcacctttacctttcgtcagctgcatgacgaagtgaacgcggtggccagtatgttgcgtagtttgggtgtgcagcgcggcgatcgggtgctggtgtatatgccgatgattgccgaagcgcatattactctgctggcctgcgcgcgcattggcgctattcacagcgtggtgtttggtggatttgccagctacagcgtggcggcgcgaattgatgacgctaaaccggtgctgattgtcagcgctgatgccggagcgcgcggtggcaaaatcattccctataaaaaattgctcgacgatgcgataagtcaggcgcagcaccagccacgccatgttttgctggtggatcgcgggctggcgaaaatggcgcgcgtcagcgggcgggatgtcgatttcgcgagcttgcgccatcaacacatcggcgcgcgggtaccggtggcgtggctggaatccaacgaaacctcctgcattctctacacttccggcacgaccggcaaacctaaaggcgtgcagcgtgacgtcggcggatatgcggtggcgctggcgaccagcatggacaccatttttggcggcaaagcgggcagcgtgttcttttgcgcaagcgatatcggctgggtggtggggcatagctatatcgtttacgcgccgctgctggcggggatggcgactatcgtttacgaaggattgccgacctggccggactgcggcgtgtggtggacaatcgtcgagaaatatcaggttagccggatgttcagtgcgccgaccgccattcgcgtgctgaaaaaattccctaccgctgaaattcgcaaacacgatctcagcagcctggaagtgctctatctggctggagaaccgctggacgagccgaccgccagttgggtgagcaatacgctggatgtgccggtcatcgacaactactggcagaccgaatccggctggccgattatggcgattgctcgcggtctggacgacaggccgacgcgtctgggaagccccggtgtgccgatgtatggctataacgtgcagttgcttaatgaagtcaccggcgaaccgtgtggcgtcaacgagaaagggatgctggtggtggaagggccgctgccgccggggtgtattcagaccatctggggcgacgacggccgctttgtgaagacttactggagcctgttttcccgcccggtgtacgccacctttgactggggcatccgtgacgctgacggttatcactttattctcgggcgcactgacgatgtaattaacgttgccgggcatcggctggggacgcgcgagattgaagagagtatctccagccatccgggcgttgccgaagtggcggtggttggggtgaaagatgcgctgaaagggcaggtggcggtggcgtttgtcattccgaaagagagcgacagtctggaagatcgtgatgtggcgcacagccaagagaaggcgattatggcgctggtggacagccagattggcaactttggccgcccggcgcacgtctggtttgtcagccaattgccaaaaacgcgatccggaaaaatgctgcgccgcacgatccaggcgatttgcgaaggacgcgatcctggagatctgacgaccattgatgatcctgcgagcttggatcagatccgccaggcgatggaagagtaagttattgtcggatgcgtcgcgcggtgcatccggcactgtgtgccgatgcctgatgcgacgctgacgcgttttatcatgcctacggacctgaaccgtaggtcggataaggcgctcgcgtcgcatccgacaccatgctcagatgcctgatgcgacgctgacgcgtcttatcaggcctacccactgtttttacaccgataatttttcccccacctttttgcactcattcatataaaaaatatatttccccacgaaaacgattgctttttatcttcagatgaatagaatgcggcggattttttgggtttcaaacagcaaaaagggggaatttcgtgagccaagataacaactttagccaggggccagtcccgcagagcgcgcggaaaggggtattggcattgacgttcgtcatgctgggattaaccttcttttccgccagtatgtggaccggcggcactctcggaaccggtcttagctatcatgatttcttcctcgcagttctcatcggtaatcttctcctcggtatttacactagttttctcggttacattggcgcaaaaaccggcctgaccactcatcttcttgctcgcttcagctttggtgttaaaggcagttggctgcctagtctgctactgggcggaactcaggttggctggtttggcgtcggtgtggcgatgtttgccattccggtgggtaaggcaaccgggctggatattaatttgctgattgccgtttccggtttactgatgaccgtcaccgtcttttttggcattagcgcgctgacggttcttagcgtgattgcggttccggctatcgcctgcctgggcggttattccgtgtggctggctgttaacggcatgggcggcctggacgcattaaaagcggtcgttcccgcacaaccgttagatttcaatgtcgcgctggcgctggttgtggggagttttatcagtgcgggtacgctcaccgctgactttgtccggtttggtcgcaatgccaaactggcggtgctggtggcgatggtggcctttttcctcggcaacagcttgatgtttattttcggtgcagcgggcgctgcggcactgggcatggcggatatctctgatgtgatgattgctcagggcctgctgctgcctgcgattgtggtgctggggctgaatatctggaccaccaacgataacgcactctatgcgagcggtttaggtttcgccaacattaccgggatgagcagcaaaacccttagcgtaatcaacggtattatcggtacggtctgcgcattatggctgtataacaattttgtcggctggttgaccttccttagcgcagctattcctccagtgggtggcgtgatcatcgccgactatctgatgaaccgtcgccgctatgagcactttgcgaccacgcgtatgatgagtgtcaattgggtggcgattctggcggtcgccttggggattgctgcaggccactggttaccgggaattgttccggtcaacgcggtattaggtggcgcgctgagctatctgatccttaacccgattttgaatcgtaaaacgacagcagcaatgacgcatgtggaggctaacagtgtcgaataactaagacgcatgtggaggctaacagtgagcaataacgctttacaaacaattattaacgcccggttaccaggcgaagaggggctgtggcagattcatctgcaggacggaaaaatcagcgccattgatgcgcaatccggcgtgatgcccataactgaaaacagcctggatgccgaacaaggtttagttataccgccgtttgtggagccacatattcacctggacaccacgcaaaccgccggacaaccgaactggaatcagtccggcacgctgtttgaaggcattgaacgctgggccgagcgcaaagcgttattaacccatgacgatgtgaaacaacgcgcatggcaaacgctgaaatggcagattgccaacggcattcagcatgtgcgtacccatgtcgatgttagcgatgcaacgctaactgcgctgaaagcaatgctggaagtgaagcaggaagtcgcgccgtggattgatctgcaaatcgtcgccttccctcaggaagggattttgagctatcccaacggtgaagcgttgctggaagaggcgttacgcttaggggcagatgtagtgggggcgattccgcattttgaatttacccgtgaatacggcgtggagagcctgcataaaaccttcgccctggcgcaaaaatacgaccgtctcatcgacgttcactgtgatgagatcgatgacgagcagagccgctttgtcgaaaccgttgctgccctggcgcaccatgaaggcatgggcgcgcgagtcaccgccagccacaccacggcaatgcactcctataacggggcgtataccagtcgcctgttccgcttgctgaaaatgtccggtattaactttgtcgccaacccgctggtcaatattcatctgcaaggacgtttcgatacgtatccaaaacgtcgcggcatcacgcgcgttaaagagatgctggagtccggcattaacgtctgctttggtcacgatgatgtcttcgatccgtggtatccgctgggaacggcgaatatgctgcaagtgctgcatatggggctgcatgtttgccagttgatgggctacgggcagattaacgatggcctgaatttaatcacccaccacagcgcaaggacgttgaatttgcaggattacggcattgccgccggaaacagcgccaacctgattatcctgccggctgaaaatgggtttgatgcgctgcgccgtcaggttccggtacgttatagcgtacgtggcggcaaggtgattgccagcacacaaccggcacaaaccaccgtatatctggagcagccagaagccatcgattacaaacgttgaacgactgggttacagcgagcttagtttatgccggatgcggcgtgaacgccttatccggcctacgtagagcactgaactcgtaggcctgataagcgtagcgcatcaggcaattccagccgctgatctgtgtcagcggctaccgtgattcattcccgccaacaaccgcgcattcctccaacgccatgtgcaaaaatgccttcgcagcggctgtctgccagctgtagtttatgccggatgcggcgtgaacgccttatccggcctacgtagagcactgaactcgtaggcctgataagcgtagcgcatcaggcaattccagccgcagacctgtgtcagcggttaccgactttcatttccgccaacaaccgcgcatttatccaacgccatgtgcaaaaatgccttcgcggcggctgtctgccagctatttttccgccgcaacaaaaccgccgttctctccagtagtggcggggcaagagaaatagctttaagcccgtcatgttgtgtggcaatcgctgctggtaacaatgtggaaagggaagtgcggcgaatcagctccagaaccgcgctaatactgttcgcctcaatgaccacctgtggatgtagccccgctttctcgcagtagtggtcaatttgctctctggtggcaaattccgcgctgagcaggaccagtttttcatcatgcaagcgactcaacgccacctgttcatggacggccagcggatgatgttgcgccacgactaacgctaaactttctgtcagtaaaggaattgcctccagctccgggctatgcacaggcgcgaaggcaatcccaacgtccaactcgtcgcggcaaagcatatcctcgattttctcctggctcatttcctgtagctggagcgtgatgctgggatagcgcgcatagaaatccgccattaaggggccgataaagtagctcgtaaaggtgggggtgacggcgatacgcaggcttcctcgcgtcagatcggcaacatcatgaatcgcccgtttacccgcccccagttcctgtaacgcccggctggcgtactgtcgccagacttctcctgcatcagtgagacgaatcgttcgcccgctacggtcaaacagcggcacgcctaaactctcctctaactggcgaatctgctgggaaagcgcaggttgggagacgtgcaacgcactggcggcacgggtgaagctgccatgttcagccacggcaagaaaataattgatatgtcgagagagcattcgcaacctataagtaaatccaatggaactcatcataaatgagacttttaccttatgacaatcggcgagtagtctgcctctcattccagagacagacagaggttaacggtgaaagagattattgatggattccttaaattccagcgcgaggcatttccgaagcgggaagccttgtttaaacagctggcgacacagcaaagcccgcgcacactttttatctcctgctccgacagccgtctggtccctgagctggtgacgcaacgtgagcctggcgatctgttcgttattcgcaacgcgggcaatatcgtcccttcctacgggccggaacccggtggcgtttctgctagcgtggagtatgccgtcgctgcgcttcgggtatctgacattgtgatttgtggtcattccaactgtggcgcgatgaccgccattgccagctgtcagtgcatggaccatatgcctgccgtctcccactggctgcgttatgccgatagtgcccgcgtcgttaatgaggcgcgcccgcattccgatttaccgagtaaagctgcggcgatggtacgtgaaaacgtcattgctcagttggctaatttgcaaactcatccaagcgtgcgcctggcgctcgaagaggggcggatcgccctgcacggctgggtctacgacattgaaagcggcagcatcgcagcttttgacggcgcaacccgccagtttgtgccactggccgctaatcctcgcgtttgtgccataccgctacgccaaccgaccgcagcgtaaccttatttttaaaccatcaggagttccaccatgattcagagtcaaattaaccgcaatattcgtcttgatcttgccgatgccattttgctcagcaaagctaaaaaagatctcagttttgccgagattgccgacggcaccggtctggcagaagcctttgtaaccgcggctttgctgggtcagcaggcgcttcctgccgacgccgcccgcctggtcggggcgaagctggatctcgacgaagactccattctactgttgcagatgattccactgcgtggctgcattgatgaccgtattccaactgacccaacgatgtatcgtttctatgaaatgttgcaggtgtacggtacaaccctgaaagcgttggttcatgagaaatttggcgatggcattattagcgcgattaacttcaaactcgacgttaagaaagtggcggacccggaaggtggcgaacgtgcggtcatcaccttagatggtaaacatctgccgaccaaaccgttctgacagccatgcgcaaccatcaaaagacgttcacgatgctgctggtactggtgctgattggtcttaatatgcgaccactgctcacctccgtcgggccactgctaccgcaattgcgccaggcgagcggaatgagctttagcgtggctgccctgttgaccgctctgccggtggttaccatgggcgggctggcgctggccggaagctggcttcatcagcatgtcagcgaacgtcgcagtgtcgccatcagtctgttgctgattgccgtcggtgcattgatgcgtgagctttacccgcaaagtgcgctgctgcttagcagcgcactgcttggtggggtggggatcggcatcattcaggcggtgatgcctagcgtgattaaacggcggtttcagcagcgcacgccactggtgatggggctgtggtccgcggctctgatgggcggcggtgggcttggtgccgccataacgccctggttagttcaacatagcgaaacctggtatcaaacactcgcctggtgggcgctgcctgccgttgttgcgctctttgcctggtggtggcaaagcgcccgcgaggtcgcctcttcccacaagacaacaaccactccggttcgcgtggtattcactccccgcgcgtggacgctgggtgtttacttcggtctgattaacggcggttacgccagcctgattgcctggttacccgctttctatattgagattggtgccagcgcgcagtacagcggttccttactggcattgatgacgcttgggcaagccgcaggagctttgctgatgcctgctatggctcgccatcaggatcggcgcaaactgttaatgctggcgctggtgttacaactggtggggttctgcggctttatctggctgccgatgcaattgccggtattgtgggcgatggtgtgtgggttaggtctgggcggcgcgtttccgctctgtttgctgctggcgctcgatcactctgtgcaaccggctattgctggcaagctggtggcgtttatgcagggaatcggttttatcatcgccgggcttgccccgtggttttctggcgtgctgcgtagtatcagcggcaattacctgatggactgggcatttcatgcgctgtgcgtcgttgggctgatgatcataaccctgcgttttgcaccagtacgttttccgcagctgtgggtcaaagaggcatgatgcgacgcttgttcctgcgctttgttcatgccggatgcggctaatgtagatcgctgaacttgtaggcctgataagcgcagcgtatcaggcaatttttataatttaaacactgctttcaactttataatctttgaaataatagtgcttatcccggtcgtttatttcgcgaataacccgacaaggaacgccagccgccacgacgtttggtggaatgtcttttgtgacgatactacccgcgccaataacagaattatccccgatggtgacgcctggattaataaccacatgacttccgatccagacgttattgccaatcgttatcggaaaagagtacatctcgccgttttttctcaattcatggtgtacagggtgtcccgtaacggaaagagtaacgttgggtgcaatcagtacgttatcaccgattgttaccgtgtagtcatcgacaatggttaaattgaaatttgcataaaaattgcggcctatatggatgttggaaccgtaagagaaatagacaggcggttctacccaggcgttttcccctaccgtggcaaacatttctttaatcaggctttctcttttttcaacttcacttggatggctgtgattaaactcatacattaacgttttcccacgaagtcttttttccggtaagccttcgcacatatcggtaaatagcttgcctgctcttattctttcggtcattggcatgttcaatgcgatcactccgttatgatatgttggtcggataaggcgctcgcgccgcatccgacattgattgcttaagcgacttcattcacctgacgacgcagcagggaaagcgggccggggccgctaagcgtgaacacggaaattaaggtgaagcccagcgccaccagacccagcaccagataagcgccctggaaaccgatgctttcatacatattgcccgccagtacagacataaaaatcatcgccagttgcttaaagaagcagaaacagaccagataaatcgtcgcactaaaacgcacttcaaactggctggtaatatatttaaagcagcccaccagcaggaacggtacttcaaacatatgcagcgttttcagaataaccacttccagcgcactggtggcgaagctactgccaataatacgtacagacataatagtgccagccagcagcagggcgtttttcccaccgatgcgattaatgatcagtggcgcaaagaacataatgctggcgttaagtaattcgcccattgtcgttacgtagccaaatacccgcgtaccctgttcaccggtagcaaagaagctagtaaagaaattagcaaactgttggtcaaaaacatcgtaggtgcaggaaacgccaataacatacagactcaaaaaccacagttttggctgtctgaacagttccagtgccagcttaaggctaaatgcgctatggttggcacctaccgcattggcaaccgtggcagaagagggcgcatccgttttggcgaaaaagagtaaaacggcgaggatgagtgcacagccagagcccagccagaaaacaaactgattattgatggtgaacatgatgccgacaatgctggcacacagcgcccagccaacacagccaaacatccgcgcgcgaccaaattcgaaattactgcgacggctgactttctcaataaatgcctctactgctggcgcaccggcgttaaaacaaaagcctagataaataccaccaacaatgcttcctactaaaatgttgtattgtaacagtggcccgaagataaaaataaagaacggcgcaaacatcactaacatgccggtaataatccacagcaggtatttgcgcagcccgagtttgtcagaaagcagaccaaacagcggttggaataataggctgaacagagaaatagcggcaaaaataatacccgtatcacttttgctgatatggttgatgtcatgtagccaaatcgggaaaaacgggaagtaggctcccatgataaaaaagtaaaagaaaaagaataaaccgaacatccaaaagtttgtgttttttaaatagtacataatggatttccttacgcgaaatacgggcagacatggcctgcccggttattattatttttgacaccagaccaactggtaatggtagcgaccggcgctcagctggaattccgcgcttacactcgggctccaggagtcgtcgccaccaatccccatatggaaaccgtcgatattcagccatgtgccttcttccgcgtgcagcagatggcgatggctggtttccatcagttgctgttgactgtagcggctgatgttgaactggaagtcgccgcgccactggtgtgggccataattcaattcgcgcgtcccgcagcgcagaccgttttcgctcgggaagacgtacggggtatacatgtcactcaatggcagatcccagcggtcaaaacaggcggcagtaaggcggtcgggatagttttcttgcggccctaatccgagccagtttacccgctctgctacctgcgccagctggcagttcaggccaatccgcgccggatgcggtgtatcgctcgccacttcaacatcaacggtaatcgccatttgaccactaccatcaatccggtaggttttccggctgataaataaggttttcccctgatgctgccacgcgtgagcggtcgtaatcagcaccgcatcagcaagtgtatctgccgtgcactgcaacaacgctgcttcggcctggtaatggcccgccgccttccagcgttcgacccaggcgttagggtcaatgcgggtcgcttcacttacgccaatgtcgttatccagcggtgcacgggtgaactgatcgcgcagcggcgtcagcagttgttttttatcgccaatccacatctgactaagaaagccactctggcggttaaattgccaacgcttattacccagctcgatgcaaaaatccatttcgctggtggtcagatgcgggatggcgtgggacgcggcggggagcgtcacactgaggttttccgccagacgccactgctgccaggcgctgatgtgcccggcttcactccatgcggtcgcgttcggttgcactacgcgtactgtgagccagagttgcccggcgctctccggctgcggtagttcaggcagttcaatcaactgtttaccttgtggagcgacatccagaggcacttcaccgcttgccagcggcttaccatccagcgccaccatccagtgcaggagctcgttatcgctatgacggaacaggtattcgctggtcacttcgatggtttgcccggataaacggaactggaaaaactgctgctggtgttttgcttccgtcagcgctggatgcggcgtgcggtcggcaaagaccagaccgttcatacagaactggcgatcgttcggcgtatcgccaaaatcaccgccgtaagcgctccacgggttgccgttttcatcatatttaatcaggctctgatccacccagtcccagacgaagccgccctgtaaacggggatactgacgaaacgcctgccagtatttagcgaaaccgccaagactgttacccatcgcgtgggcgtattcgcaaaggatcagcgggcgcgtctctccaggtaggctaagccattttttgatggaccatttcggcacagccgggaagggctggtcttcatccacgcgcgcgtacatcgggcaaataatatcggtggccgtggtgtcggctccgccgccttcatactgcaccgggcgggaaggatcgacagatttgatccagcgatacagcgcgtcgtgattagcgccgtggccactttcattccccaggctccagatgatcacactcgggtgattacgatcgcgctgcaccattcgcgttacgcgttcgctcatcgccggtagccagcgcggatcatcggtcagacgattcattggcaccatgccgtgggtttcaatattggcttcatccaccacatacaggccgtagcggtcgcacagcgtgtaccacagcggatggttcggataatggctacagcgcacggcgttaaagttgttctgcttcatcagcaggatatcctgcaccatcgtctgctcatccatgacctgaccatgcagaggatgatgctcgtgacggttaacgcctcgaatcagcaacggcttgccgttcagcagcagcagaccattttcaatccgcacctcgcggaaaccgacatcgcaggcttctgcttcaatcagcgtgccgtcggcggtgtgcagttcaaccaccgcacgatagagattcgggatttcggcgctccacagtttcgggttttcgacgttcagacgtagtgtgacgcgatcggcataaccaccacgctcatcgataatttcaccgccgaaaggcgcggtgccgctggcgacctgcgtttcaccctgccataaagaaactgttacccgtaggtagtcacgcaactcgccgcacatctgaacttcagcctccagtacagcgcggctgaaatcatcattaaagcgagtggcaacatggaaatcgctgatttgtgtagtcggtttatgcagcaagctgacgtcacggaaaatgccgctcatccgccacatatcctgatcttccagataactgccgtcactccagcgcagcaccatcaccgcgaggcggttttctccggcgcgtaaaaatgcgctcaggtcaaattcagacggcaaacgactgtcctggccgtaaccgacccagcgcccgttgcaccacagatgaaacgcgctgttaacgccatcaaaaataattcgcgtctggccttcctgtagccagctttcatcaacattaaatgtgaggctgtaacaacccgtcggattctccgtgggaacaaacggcggattgaccgtaatgggataggtcacgttggtgtagatgggcgcatcgtaaccgtgcatctgccagttactggggacgacgacagtatcggcctcaggaagatcgcactccagccagctttccggcaccgcttctggtgccggaaaccaggcaaagcgccattcgccattcaggctgcgcaactgttgggaagggcgatcggtgcgggcctcttcgctattacgccagctggcgaaagggggatgtgctgcaaggcgattaagttgggtaacgccagggttttcccagtcacgacgttgtaaaacgacggccagactatccgtaatcatggtcatagctgtttcctgtgtgaaattgttatccgctcacaattccacacaacatacgagccggaagcataaagtgtaaagcctggggtgcctaatgagtgagctaactcacattaattgcgttgcgctcactgcccgctttccagtcgggaaacctgtcgtgccagctgcattaaactatcggccaacgcgcggggagaggcggtttgcgtattgggcgccagggtggtttttcttttcaccagactgacgggcaacagctgattgcccttcaccgcctggccctgagagagttgcagcaagcggtccacgctggtttgccccagcaggcgaaaatcctgtttgatggtggttaacggcgggatataacaactgctgtcttcggtatcgtcgtatcccactacgctgatatccgcaccaacgcgcagcccggactcggtaatggcgcgcattgcgcccagcgccatctgatcgttggcaaccagcatcgcagtgggaacgatgccctcattcagcatttgcatggtttgttgaaaaccggacatggcactccagtcgccttcccgttccgctatcggctgaatttgattgcgagtgagatatttatgccagccagccagacgcagacgcgcgctgacagaacttaatgggcccgctaacagcgcgatttgctggtgacccaatgcgaccagatgctccacgcccagtcgcgtaccgtcttcatgggagaaaataatactgttgatgggtgtctggtcagagacatcaagaaataacgccggaacattagtgcaggcagcttccacagcaatggcatcctggtcatccagcggatagttaatgatcagcccactgacgcgttgcgcgagaagattgtgcaccgccgctttacaggcttcgacgccgcttcgttctaccatgctcaccaccacgctggcacccagttgatcggcgcgagatttaatcgccgcgacaatttggctcggcgcgtgcagggccagactggaggtggcaacgccaatcagcaagctctgtttgcccgccagttgttgtgccacgcggttgggaatgtaattcagctccgccatcgccgcttccactttttcccgcgttttcgcagaaacgtggctggcctggttcaccacgcgggaaacggtctgataagagacaccggcatactctgcgacatcgtataacgttactggtttcacattcaccaccctgaattgactctcttccgggcgctatcatgccataccgcgaaaggttttgcgccattcgatggtgtcaacgtaaatgcatgccgcttcgccttccggccaccagaatagcctggctttcaaccccttcttcgatctgttttgctacccgttgtagcgccggaagatgcttttccgctgcctgttcaatggtcattgcgctcgccatatacaccagattcagacagccaatcacccgttgttcactgcgcagcggtacggcgatagaggcgatcttctcctcctgatcccagccgcggtagttctgtccgtaaccctctttgcgcgcgcgcgccagaatggcttccagctttaacggttcccgtgccagttgatagtcatcaccggggcgggaggctaacatttcgattaattccttgcggtcttgttccgggcaaaaggccagccaggtcaggccgctggcggttttcagaagcggcaaacgtcgcccgaccattgcccggtgaaaggataagcggctgaaacggtgagtggtttcgcgtaccaccattgcatcaacatccagcgtggacacatctgtcggccataccacttcgcgcaacagatcgcccagcagtggggccgccagtgcagaaatccactgttcgtcacgaaatccttcgcttaattgccgcactttgatggtcagtcgaaaactatcatcggaggggctacggcggacatatccctcttcctgcagcgtctccagcagtcgccgcacagtggtgcgatgcaggccgctgagttccgccagcagcccgacgctggcaccgccatcaagtttatttaacatatttaataacattagaccgcgggttaagccgcgcacggttttgtattccgtctgctcattgttctgcatattaatactcatttctatagttaaaacaacgtggtgcacctggtgcacattcgggcatgttttgattgtagcgctaaacacccttcctatactgagcgcacaataaaaaatcatttacatgtttttaacaaaataagttgcgctgtactgtgcgcgcaacgacattttgtccgagtcgtgaggtactgaaatggcaatacaacaccctgacatccagcctgctgttaaccatagcgttcaggtggcgatcgctggtgccggcccggttgggctgatgatggcgaactatctcggccagatgggcattgacgtgctggtggtggagaaactcgataagttgatcgactacccgcgtgcgattggtattgatgacgaggcgctgcgcaccatgcagagcgtcggcctggtcgatgatgttctgccgcacactacgccgtggcacgcgatgcgttttctcaccccgaaaggccgctgttttgctgatattcagccaatgaccgatgaatttggctggccgcgccgtaacgcctttattcagccgcaggtcgatgcggtgatgctggaaggggtgagccgttttccgaatgtgcgctgcttgttttcccgcgagctggaggccttcagtcagcaagatgacgaagtgaccttgcacctgaaaacggcagaagggcagcgggaaatagtcaaagcccagtggctggtagcctgtgacggtggagcaagttttgtccgtcgcactctgaatgtgccgtttgaaggtaaaactgcgccaaatcagtggattgtggtagatatcgccaacgatccgttaagtacgccgcatatctatttgtgttgcgatccggtgcgcccgtatgtttctgccgcgctgcctcatgcggtacgtcgctttgaatttatggtgatgccgggagaaaccgaagagcagctgcgtgagccgcaaaatatgcgcaagctgttaagcaaagtgctgcctaatccggacaatgttgaattgattcgccagcgtgtctacacccacaacgcgcgactggcgcaacgtttccgtattgatcgcgtactgctggcgggcgatgccgcgcacatcatgccggtatggcaggggcagggctataacagtggtatgcgcgacgcctttaacctcgcatggaaactggcgttggttatccaggggaaagcccgcgatgcgctgctcgatacctatcaacaagaacgtcgcgatcacgccaaagcgatgattgacctgtccgtgacggcgggcaacgtgctggctccgccgaaacgctggcagggtacgttacgtgacggcgtttcctggctgttgaattatctgccgccagtaaaacgctacttcctcgaaatgcgcttcaagccgatgccgcaatattacggcggtgcgctgatgcgtgagggcgaagcgaagcactctccggtcggcaagatgtttattcagccgaaagtcacgctggaaaacggcgacgtgacgctgctcgataacgcgatcggcgcgaacttcgcggtaattggctggggatgcaatccactgtgggggatgagcgacgagcaaatccagcagtggcgcgcgttgggcacacgcttcattcaggtggtgccggaagtgcaaattcataccgcacaggataaccacgacggcgtactacgcgtgggcgatacgcaaggtcgcctgcgtagctggttcgcgcaacacaatgctagcctggtggtgatgcgcccggatcgctttgttgccgccaccgccattccgcaaaccctgggcaagaccctgaataaactggcgagcgtgatgacgctgacccgccctgatgccgacgtttctgtcgaaaaggtagcctgatatgcacgcttatcttcactgtctttcccacagcccgctggtggggtatgtcgacccggcgcaagaggtgctcgatgaggtcaatggcgtgattgccagcgcccgcgagcgtattgcggcattctcccctgaactggtggtgctgtttgcgccagatcactacaacggctttttctatgacgtgatgccaccgttctgtttaggcgttggagcgacggcaattggtgatttcggcagtgcggcaggagagctgcccgtgcctgtggagctggcggaggcctgtgcgcatgccgtcatgaagagcgggatcgatcttgccgtttcttactgtatgcaggtggaccacgggttcgcccagccgctggagttcctgctcggtgggctggataaggtgccagttctgcctgtgttcatcaacggtgtcgccacgccgctgcccggtttccagcgtacccgcatgttgggtgaagccattggacgtttcaccagcactctcaataaacgcgtgctgttcctgggttccggtgggctttcccatcagccgccggtgcccgaactggcgaaagccgatgcccatatgcgcgaccgtctgttggggagcgggaaagatttacccgccagtgagcgcgaattgcgtcagcaacgggtgattagcgccgctgagaagtttgttgaggatcagagaacgctgcatccgctcaacccgatttgggataaccagttcatgactttgctggagcagggacgcatacaggaactggatgccgtcagtaacgaagagctttccgccattgccggaaagagcacacatgaaatcaaaacctgggtcgccgcttttgccgctatttctgcgtttggcaactggcgtagcgaagggcgttattaccgcccaatcccggagtggattgccggatttggcagcttaagcgccagaacagagaactgaatatgcaggagaagatgatgagttatcagccacaaaccgaagccgccaccagccgttttctgaatgtagaagaagcgggtaaaacgctgcgcatccattttaatgactgcggacaaggcgacgaaaccgttgtcctgctgcatggttccggcccgggtgctactggctgggcgaacttcagccgcaatatcgatccgctggtagaggcgggctatcgggtgatcctgctggattgtccgggttggggcaagagcgatagcgtcgttaatagtggtagccgaagcgatcttaatgcacgaatcctgaaaagcgtggtggatcaactggatatcgccaaaatccacctgctgggcaacagcatggggggccatagttctgtggcgttcacccttaaatggccggagcgcgtcggcaaactggtgctgatgggcggcggtacgggcggcatgagtttgtttacgccgatgccaaccgaaggtattaagcgactgaatcagctttatcgtcagccgactatcgaaaacctgaagctgatgatggatatcttcgtttttgataccagcgatttgaccgacgccctgtttgaagcgcgcctgaataatatgctgagccgccgcgatcacctggaaaacttcgttaagagcctggaagctaatccgaaacagttcccggattttggcccacgtctggcggaaatcaaagcgcaaaccctgattgtctgggggcgcaacgaccgctttgtgccgatggatgcgggtctgcgtctgctgtccggcattgccggttctgaactgcatatcttccgcgactgtggtcactgggcgcagtgggaacatgccgacgctttcaatcaactggtgctgaatttcctcgcacgcccttaaggaatggtcatgacgaagcatactcttgagcaactggcggcggatttacgccgcgccgcagagcagggcgaagcgattgcaccgctgcgcgatctgattggtatcgataacgctgaagcggcttacgccattcagcacataaatgtgcaacatgacgttgcgcaggggcgtcgcgtggtagggcgtaaagtgggcctgacacatccgaaagtgcaacaacaactgggcgttgatcaaccggattttgggacgttatttgccgacatgtgttatggcgataacgaaatcattcctttttcccgtgttctgcaaccccgcattgaagcggagatcgcactggtgttgaaccgcgatttgcccgcaaccgatatcaccttcgacgaattgtataacgccattgaatgggtacttccggcgctggaagtggtggggagccgcattcgcgactggagcattcagtttgtcgataccgtggcagataacgcctcctgtggggtgtatgtcatcggcggtccggcgcaacgtccggcggggttagacctgaaaaactgcgccatgaagatgacgcgtaataacgaagaggtttctagcgggcgcggcagcgaatgcctgggacatccgcttaatgcggccgtctggctggcacgcaaaatggccagtctgggtgaaccgctgcgcaccggagatatcattcttaccggggcattaggtccgatggtggcggtgaatgcgggcgatcgttttgaagcccatattgaaggcataggtagtgttgctgcgacatttagtagcgcagccccaaaaggaagtctgagttgagctaagccccaaaaggaagtctgtcatgagtaagcgtaaagtcgccattatcggttctggcaacattggtaccgatctgatgattaaaattttgcgtcacggtcagcatctggagatggcggtgatggttggcattgatcctcagtccgacggtctggcgcgcgccagacgtatgggcgtcgccaccacccatgaaggggtgatcggactgatgaacatgcctgaatttgctgatatcgacattgtatttgatgcgaccagcgccggtgctcatgtgaaaaacgatgccgctttacgcgaagcgaaaccggatattcgcttaattgacctgacgcctgctgccatcggcccttactgcgtgccggtggttaacctcgaggcgaacgtcgatcaactgaacgtcaacatggtcacctgcggcggccaggccaccattccaatggtggcggcagttagtcgcgtggcgcgtgttcattacgccgaaattatcgcttctatcgccagtaaatctgccggacctggcacgcgtgccaatatcgatgaatttacggaaaccacttcccgagccattgaagtggtgggcggcgcggcaaaagggaaggcgattattgtgcttaacccagcagagccaccgttgatgatgcgtgacacggtgtatgtattgagcgacgaagctagtcaagatgatatcgaagccagtatcaatgaaatggctgaggcggtgcaggcttacgtaccgggttatcgcctgaaacagcgcgtgcagtttgaagttatcccgcaggataaaccggtcaatttaccgggcgtggggcaattctccggactgaaaacagcggtctggctggaagtcgaaggcgcagcgcattatctgcctgcctatgcgggcaacctcgacattatgacttccagtgcgctggcgacagcggaaaaaatggcccagagtctggcgcgcaaggcaggagaagcggcatgaacggtaaaaaactttatatcagcgacgtcacattgcgtgacggtatgcacgccattcgtcatcagtatagcctggaaaacgttcgccagattgccaaagcactggacgatgcccgcgtggatagcattgaagtggcccacggcgacggtttgcaaggttccagctttaactatggtttcggcgcacatagcgaccttgaatggattgaagcggcggcggatgtggtgaagcacgccaaaatcgcgacgttgttgctgccaggaatcggcactattcacgatctgaaaaatgcctggcaggctggcgcgcgggtggttcgtgtggcaacgcactgtaccgaagctgatgtttccgcccagcatattcagtatgcccgcgagctcggaatggacaccgttggttttctgatgatgagccatatgaccacgccggagaatctcgccaagcaggcaaagctgatggaaggctacggtgcgacctgtatttatgtggtggattctggcggtgcgatgaacatgagcgatatccgtgaccgtttccgcgccctgaaagcagagctgaaaccagaaacgcaaactggcatgcacgctcaccataacctgagtcttggcgtggcgaactctatcgcggcggtggaagagggctgcgaccgaatcgacgccagcctcgcgggaatgggcgcgggcgcaggtaacgcaccgctggaagtgtttattgccgccgcggataaactgggctggcagcatgggaccgatctctatgcgttaatggatgccgccgacgacctggtgcgtccgttgcaggatcgaccggtacgagtcgatcgcgaaacgctggcgctgggatacgctggtgtttacagcagcttcctgcgtcactgtgaaacggcggcggcgcgttatggcttaagtgcggtggatattctcgttgagctgggcaaacgccggatggttggcggccaggaggatatgatcgttgacgtggcgctggatctgcgcaacaacaaataatgatgactgccgagaacgtgcattttgtatgcccatcccagcacgactgccggatgcggcgtgaacgccttatccggcctacggatggcgtgagaatttgtaggtctgataagacgcgttagcgtcgcatcaggcatctgcgcacgactgccggatgcggcgtgaacgccttatccggcctacggatggcgcgggaatttgtaggcctgataagacgcgttagcgtcgcatcaggcatctgcgcacgactgccggatgcggcgtgaacgccttatccggcctacgggtggcgcgagaatttgtaggcctgataagacgcgttagcgtcgcatcaggcatctgcgcacgactgccggatgcggcgtaaacgccttatccggcctacggatggcgcgggaatttgtaggcctgataagacgcgttagcgtcgcatcaggcatctgcacacgactgccggatgcgataaacgtcttgtccggcctacatttcgcccgtaggcagtcattaaatagttctgattacgcggctggcaatgtatcagtcgcgattcacctgcactcgcaacgaggttcatcttatgagcactcgtacccctagtagttctagttcccgcctgatgctgaccatcgggctttgttttttggtcgctctgatggaagggctggatcttcaggcggctggcattgcggcgggtggcatcgcccaggctttcgcactcgataaaatgcaaatgggctggatatttagcgccggaatactcggtttgctacccggcgcgttggttggcggaatgctggcggaccgttatggtcgcaagcgcattttgattggcagtgttgcgctgtttggtttgttcagtctggcaacggcgattgcctgggatttccccagtctggtctttgcgcggctgatgaccggtgtcgggctgggggcggcgttgccgaatcttatcgccctgacgtctgaagccgcgggtccacgttttcgtgggacggcagtgagcctgatgtattgcggtgttcccattggcgcggcgctggcggcgacactgggtttcgcgggggcaaacttagcatggcaaacggtgttttgggtaggtggtgtggtgccgttgattctggtgccgctattaatgcgctggctgccggagagcgcggttttcgctggcgaaaaacagtctgcgccaccactgcgtgccttatttgcgccagaaacggcaaccgcgacgctgctgctgtggttgtgttatttcttcactctgctggtggtctacatgttgatcaactggctaccgctacttttggtggagcaaggattccagccaagccaggcggcaggggtgatgtttgccctgcaaatgggggcggcaagcgggacgttaatgttgggcgcattgatggataagctgcgtccagtaaccatgagcctactgatttatagcggcatgttagctagcctgctggcgcttggaacggtgagcagttttaacggtatgttgctggcgggatttgtcgcggggttgtttgcgacaggtgggcaaagcgttttgtatgccctggcaccgttgttttacagtagccagatccgcgcaacaggtgtgggaacagccgtggcggtagggcgtctgggggctatgagcggtccgttactggccgggaaaatgctggcattaggcactggcacggtcggcgtaatggccgcttctgcaccgggtattcttgttgctgggttggcggtgtttattttgatgagccggagaagtcgaatacagccgtgcgccgatgcctgacgtgccttattaggcaggggcgaaagggacttcaccccaatacacctacggcgtttacaggtatactcgctaaaaattattcagcgggtttggaaacaaagatggcaaaacttaccttacaagagcagttgctcaaagcaggattagtcaccagcaaaaaagcggcgaaggtggagagaacggcgaaaaaaagccgcgttcaggcgcgtgaagctcgggcggcggtagaagaaaataaaaaggcacagcttgagcgtgataaacagcttagcgaacagcaaaaacaagcggcgttggcgaaagaatataaagctcaggtgaagcagcttattgaaatgaaccgaatcaccattgccaatggcgatattggttttaacttcactgacggcaatctgattaagaagatttttgtcgataagctcacacaggcgcagttgattaatggtcgtctggcgattgcccgcttgttggtcgataacaatagcgaaggtgaatacgccattattcccgccagcgttgccgataaaattgctcagcgcgatgccagcagtatagcgttgcacagcgcgctcagcgccgaagagcaggatgaagacgacccgtatgccgacttcaaagtgcctgatgatttgatgtggtaaacatagataagtcgtgcgcagatgcctgatgcgacgctatgcgcgtcttatcaggcctacggtttatgggcgaagtgtagaccggataaggcgttcacgccgcatccggcagtcgtgcgccatgcctgatgcgacgctttgcgcgtcttatcaggcctacggcttacgggcgaagtgtaggccggataaggcgttcacgccgcatccggcagtcgtgctattatcaacgcatattcagtttattggcgtggtaggcaatatgctcgccaataaaactggagacaaaataatagctgtgatcataaccctcgtgataacggattaacgtcttgatattcatctcctggcagatcttttcaagatttggagtccgcagctgttctgcgtaaaaatcatcactcaacccctgatcaaccatgatttccgcaacgcgttgaccttgactaataagactcaccgggtcgtaatccaaccaggcatctttattttcagcaagatatgcagcaaaggcttgctgtccccacggcacttggcttggggagacaatggggctaaacgcgctgacgctgacatattcatctgggttacgtaacgccagcaccagcgcgcccagcccgcccatagaatgaccagagatagactttttggccgttgccggaaaatgatgcatcactaaatccggcagctcgttgcggatatagtcatacattttgtaatgttcattccacggcgcttgcgtcgcgttcaggtaaaacccggcaccttgcccgagatcgtaacggtcagcatctgcgacatgactgcctcgcggactggtgtccggcgcaacaacaataatgttgtgctcagccgcgtaacgctgcatcccgcttttagtaatgaaattctgctcgttgcaggtcaggccactaagccagtacagcaccggcaatttttcattcgcggcttttggtgggagatagacgccgacattcatttcacatttcagactttgggaataatgccgatacatattttgccagccgccaaagctgacatgtttttcaatgagttccatcagtcattatctcagggttaatcccccggacggctgcccggggagagtattaagaacccccgcctgaagtggacggggtaaacctgcgggaaatcagtaacgaattacggttcgaatggatttgccttcatgcatcaggtcgaaggcgtcattaatttcatccaggctcatggtatgcgtgacaaacggttccagatcgatatcacctttcatcgcatcttcaaccatgcccggtaactgggaacgacctttcacgccgccaaacgcggaacctttccatacgcgaccagtgaccaactggaatggacgggtggagatttcctgaccggcaaccgcgaccccgatgatcacgctctgaccccagccgcggtgcgcactttccagcgccgcacgcatcacgttgacgttaccgatgcattcaaaggtatggtcgataccccatttgttgatatccaacaggacatcttttatcggtttgtcgtagtcattcgggttaatgcagtcggtagcaccgaagcgacgcgccagatcgaatttcttcgggttggtatcgatagcgataatccgacccgctttcgcctgacgcgcgccctgaaccactgccagaccaatcgcgccaagaccaaacacggcaacagaatcacctggctggactttagctgtgttgtgtaccgcgccaataccggtggtcacgccacagcccagcaggcagacgtgttcatggtttgcttctggattaatttttgccagagacacttccgcgactacggtgtattcactgaatgtagagcaccccatgtagtgataaagcggctgcccgttgtaagaaaaacgggtggtgccgtctggcatcaggcctttaccctgggtttcgcgaaccgcaacacagaggttagttttgccagaacgacagaactcacactcgccgcactccgcggtgtaaagcgggatcacatggtcgccaggtttgacgctggttacgccttcaccgacttcaaccacaacgccggccccttcgtgaccgagaaccaccgggaatacaccttccgggtcatcgccggagagggtaaatgcgtcggtatggcaaacgccggtatgggtgactttaattagcacttcaccttttttcggtggtgcaacgtcaatttcaacgatttccagcggtttaccgggagcaaatgcaacggcagcacgacttttcatctctcgctcttcctcaatatggtaatagattcagttatttaagataggcacgaaccagttcaatagtgtcgtcaacggattggctgacttcgcggctgtagcagtcatttcggtcaaacgtttcccggatatggctttcaagcacttctgccatcagcccattagccgcgccccgaacggcagcgatctgttggagtatggcacggcattcggcatcaccctccaggctccgttccagagcatcaatctgcccccgaatacgacgaactcgagtaaggacctttttcttctcttccggagtactgggcatttcgcacctcatcatctgcatgcaatatactataggggggtattctatatgtcaatgcatacccccctatagtatataacactggagaataaaatttatccggtgaatgtggtcggaaaacaaagaggaaaggggggggctaatcggcagggaaggccgccccggatagcgggcggcagaaggaatcagaatttccaggtcagacgggctgcaagttgcagaccgttacgagatggacggtcccctcgcccccttggggagagggttagggtgagggggcgttcaccgtactttcaacaggttaactccccctttctgagaggaaacaaaattaacgcagaatcttcttctcagccaaatccagcgcaaagtagctgaaaatcagatccgcacccgcacgcttaatgctacctaagctttcgagcacgactttctcttcatctatagcacccgccagcgcggcgaacttaatcatcgcatactcaccgctcacctgatacgcgccaatcggcaattcagtacgttcacgcagctcacgcacgatgtcgaggtacgctccagcaggtttaaccatcaggcagtctgcgccctgggcttcatccagcagactttcacgaatcgcctcacgacggttcattgggttcatctgatagcttttgcggtcgccttttaatgcgcttccggcagcttcacggaacgggccataaaaggaggaggcgaacttggtgctatagctcataatcgccgtatctttaaatcccgcagcgtccagcgcctgacgaatcgcctgtacctggccgtccatcgcggcggaaggggcgatgaagtctgcacctgcagcagctgcaaccacggcttgcttgcctaaattttccagagtcgcgtcgttgtcgacgccatgctcgcacagcacaccgcagtgaccgtgagaagtgtattcacagaagcaggtgtcactcataacgatcatttctggcacggtctgcttgcagatgcggctcatacgcgccaccagtccatcttcccgccaggcatcgctgccggtttcatcggtatggtgagagatgccaaaagtcatcacggaacgaataccggcgttggcgatgcgttcaatttcgcgtgccagatgtttctctggaatgcgcatcacgcctggcatggcttcaacggctttgtagtcgtcaatttcttcttcaacaaagatcggcaacaccaggtcgttaaggctaagtgttgtctcttcaaacatagcgcgcagcgcaggagatttgcgcaggcgacgagggcgttggattaagtctgtcatggtctgcctgatgtttgtggaatcgaggggcatagtatacctgaagcagggtagggatgttttacgaaagttgtcgcgatgttgacaagaagagaatggaagagaggccaggacatctttttaatagaaacagcaataattttatattcactgaaaatatttttaatcttgaatattatcgggcgttaaaatattacattgtggttttcaatgcgttatccgcagcgtgacgctccagcgccagttcaatcaaacgtgtgatcagatcggtgtaacccagaccgctggcttgccacagcttcggatacatactgatattagtgaagccaggcagggtgttgatctcgttgatcaccacttcgttctctggggttaaaaacacgtctacacgcgccatgcctgcgcatcccaacgtttgataagcctgaacggcaatcgcccggatcttatcgttgatttctggcgcaatggctgccggaactaccactttcgcgccatcttcgtcaatgtacttggtgtcgtaggcatagaaatcgctggtgagtacgatctctccacaggtgctggcttgcggattgtcgttgcccagaactgcgcattcgatctcacgacctttgatcccttgctcaacgatcactttatgatcgaactcgaacgccagatcgacggcaattgcgtactgttcttcactggttactttgctgacaccaacagaagagccctgattagccggttttacaaacagtggtaaccccagtttagactccacttcggcaaaactaatgttgtgacgattggcgcgcgtcagggtaataaatggcgcaatgttcagcccggcatcgcgtagcagacgtttggtgacatctttgtccatacaggctgcactagccagaacatcagaacctacaaacggtaaattggcgacccgcagcattccctgcaaggaaccatcttcgcccagcgtaccgtggacaatcgggaaaatgacatccaccgtcggcaacggctgaccgttttgcgcgtcgataagctgatgctcatgtttacctggcacctgcgcaaggctggtcgcgctagggcgcaacgcaatatgggcaggatcgtctgcatttagcagataattgctggcatcgctgacgtgccattgcccttgtttatcaatgcccagcagcacaacgtcgaagcgacttttatcaatggcatcgacaatgttttttgcgctttgcagagacacttcatgttccgcacttttaccaccaaaaacgattcctacccgcagtttttccatcttaaaaacctatcccgtctaacacaaagtgcatacattaccacgacaaaacgggggattcgcggccttctgaaagattgttgcaatcttctgctgacaaagcgtgcaacgtactggtgaagaaagtgcgttatctcaaagatgtgcgcaagatcacaaaaatgatgaacgggaagctaatttattcctggcttaaatggccatgcggtgagtttttttctcttaattataagttaacgaagagaatatatttcataacttttatttataataaaggttgataattaaaagcctatattttgtgtgggtaattatttaaataagagaaacgtttcgctggtaatcaaacaaaaaatatttgcgcaaagtatttcctttgtcataaaaataatacttccagacactatgaagttgtgaaacataatgttaacttctccatactttggataaggaaatacagacatgaaaaatctcattgctgagttgttatttaagcttgcccaaaaagaagaagagagcaaagaactgtgtgcgcaggtagaagctttggagattatcgtcactgcaatgcttcgcaatatggcgcaaaatgaccaacagcggttgattgatcaggtagagggggcgctgtacgaggtaaagcccgatgccagcattcctgacgacgatacggagctgctgcgcgattacgtaaagaagttattgaagcatcctcgtcagtaaaaagttaatcttttcaacagctgtcataaagttgtcacggccgagacttatagtcgctttgtttttattttttaatgtatttgtacatggagaaaataaagtgaaacaaagcactattgcactggcactcttaccgttactgtttacccctgtgacaaaagcccggacaccagaaatgcctgttctggaaaaccgggctgctcagggcgatattactgcacccggcggtgctcgccgtttaacgggtgatcagactgccgctctgcgtgattctcttagcgataaacctgcaaaaaatattattttgctgattggcgatgggatgggggacagcgaaattactgccgcacgtaattatgccgaaggtgcgggcggcttttttaaaggtatagatgccttaccgcttaccgggcaatacactcactatgcgctgaataaaaaaaccggcaaaccggactacgtcaccgacagcgctgcaagtgcaaccgcctggagtaccggtgtcaaaacctataacggcgcgctgggcgtcgatattcacgaaaaagatcacccaacgattctggaaatggcaaaagccgcaggtctggcgaccggtaacgtttctaccgcagagttgcaggatgccacgcccgctgcgctggtggcacatgtgaccagccgcaaatgctacggtccgagcgcgaccagtgaaaaatgtccgggtaacgctctggaaaaaggcggaaaaggaagcattaccgaacagctgcttaacgctcgtgccgacgttacgcttggcggcggcgcaaaaacctttgctgaaacggcaaccgctggtgaatggcagggaaaaacgctgcgtgaacaggcacaggcgcgtggttatcagttggtgagcgatgctgccagtctgaatagcgtgacggaagcgaatcagcaaaaacccctgcttggcctgtttgctgacggcaatatgccagtgcgctggctaggaccgaaagcaacgtaccatggcaatatcgataagcccgcagtcacctgtacgccaaatccgcaacgtaatgacagtgtaccaaccctggcgcagatgaccgacaaagccattgaattgttgagtaaaaatgagaaaggctttttcctgcaagttgaaggtgcgagtatcgataaacaggatcatgctgcgaatccttgtgggcaaattggcgagacggtcgatctcgatgaagccgtacaacgggcgctggaattcgctaaaaaggagggtaacacgctggtcatagtcaccgctgatcacgcccacgccagccagattgttgcgccggataccaaagctccgggcctcacccaggcgctaaataccaaagatggcgcagtgatggtgatgagttacgggaactccgaagaggatagtcaagaacataccggcagtcagttgcgtattgcggcgtatggcccgcatgccgccaatgttgttggactgaccgaccagaccgatctcttctacaccatgaaagccgctctggggctgaaataaaaccgcgcccggcagtgaattttcgctgccgggtggtttttttgctgttagcaaccagacttaatggcagatcacgggcgcatacgctcatggttaaaacatgaagagggatggtgctatgaaaataacattactggttaccttgcttttcggtctggtttttttaaccaccgtcggcgctgccgagagaactttaaccccacaacaacagcgtatgacctcctgtaatcagcaggcgacggcgcaggcgttgaaaggggatgctcgtaagacctacatgagtgattgcctgaagaacagcaagtctgcgcctggcgaaaaaagtttgacgccacagcagcaaaagatgcgcgaatgcaataatcaagcaacacaacaatctctgaaaggtgatgatcgtaataagtttatgagtgcctgcctcaagaaagccgcctgatacctgatagtgctaacgggtgagctacgaaaatggctcacccgaaatatcatacttctgcctttagctccgtctctataatttgggaaaattgtttctgaatgttcccaaaaataatgaatgatgaaaactttttcaaaaaagcggcggcgcacggggaggaacctcctttaactcctcaaaacgaacatcagcggtccgggctgcgcttcgcccgtcgcgtcagactaccccgtgcggttggcctggctggcatgttcttaccgattgctagtacgctggttagtcacccgccgccgggctggtggtggctggtgttggtcggctgggcgttcgtctggccgcatttagcctggcagatagcgagcagggccgtcgatccgcttagccgggaaatttacaacttaaaaaccgatgcagtattagcgggaatgtgggtaggcgtaatgggcgtaaacgtgctgccttccaccgcgatgttgatgattatgtgtctgaatttgatgggggcaggcggcccccgtctgtttgtcgcgggtctggtgttgatggtggtttcctgccttgtcaccctcgagctgacgggcattaccgtgagcttcaatagtgcgccgctggaatggtggctctcccttcccattattgtcatttatcctctgctgtttggctgggtcagctaccagacggcaaccaaactggcggaacataaacgcaggttgcaggtcatgagtacccgcgacggcatgacgggcgtgtataaccgacgtcattgggaaactatgttacgcaatgaatttgataactgtcggcggcataatcgcgatgcaacgttactgattatcgatatcgaccatttcaagagcatcaacgatacctggggccatgatgtgggcgatgaagcgattgtggcgcttacccgacagttacaaattgccctgcgcggtagcgatgtgattggtcggtttggcggcgatgagtttgcagtaatcatgtccggtacgccagctgagagcgccattaccgccatgttacgggtgcatgaagggctaaatacattacgtttgccgaatacgccacaggtaactttacggattagtgtgggggttgcgccgctgaacccacaaatgagtcactatcgtgagtggttgaaaagcgcagatttggcgctttacaaagcaaagaaagccggacgtaaccgcaccgaagtggcggcctgacgtccggcgaaagtcatcaggatttgctgagtttttcacttttttccatacacttcgtcatcgcttcgatcactgcagcacggaagcctttctcttccagtacgcgtaccgcttcaatggtggtgcctcccggactgcagaccatatctttcagtgcccccggatgttctcccgtttccagcaccatttttgcggaacccattaccgcctgagcggcaaatttatacgcctgggcgcgtggcatcccgcccagcacggcggcgtcggccatcgcttcgataaacataaatacgtaggctgggctagaaccgctcacaccgaccaccgggtggatcatcggctcagcaattacttccgcttcgccaaagcagcggaaaatattcagcacatcagcggtatcttctggggttaccagcgcgtttggcgttacggaggtcatcccggcattaaccagtgcgggagtgttcggcatggcgcggataattttccggtcatggcccagcgcgcgggcaagctggtcgagcgtgacacctgcagcaatagaaacgaccagagagtctttattcaggctggaggtgatttcgctaagcactttaatcatgatgccaggtttaacggcagcaaaaatgatgtcggcgatttgcgccacttcttgcgcgctttctgcggcgttgatgccgaactggtcatgcagggcggcgactttatccggggagggggtgtatacccagatttgccctggaagcacctgaccgctggcaatcagaccgccgagaatggcttttcccatattgccgcagccaataaaaccgattttcttttccattgcctcactcctgccgtgaaattcattgttttgataatcgctggcagaagcataaacagaactatgccggaaggcaaaagcgcgacacaatagaggattacccaacaaaggatgactttatgacaatttgggtggatgccgacgcgtgtcccaatgtaattaaagagattttgtatcgcgcggcggaacgtatgcagatgccgctggtactggtagcaaaccagagtttacgcgtgccgccaagccgatttattcgtacgctgcgcgtcgcggcaggtttcgacgttgccgataacgaaattgtccggcagtgtgaagcgggcgatttggtgatcaccgcagatatacctttggctgctgaagccatcgagaaaggcgctgcggcgcttaatccgcgcggcgaacgttacacgccagcgaccattcgtgagcgcctgacgatgcgcgattttatggataccttacgtgccagtgggatccagaccggcggaccagatagccttagtcaacgtgaccgccaggcctttgccgcggagctggagaagtggtggctggaagtgcaacgtagtcgtggctaaatgtaatttattatttacacttcattcttgaatatttattggtatagtaaggggtgtattgagattttcactttaagtggaattttttctttacaatcgaaattgtactagtttgatggtatgatcgctattctcatgacaccggctttcgccgcattgcgacctattggggaaaacccacgatgacacaacctctttttctgatcgggcctcggggctgtggtaaaacaacggtcggaatggcccttgccgatagccttaaccgtcggtttgtcgataccgatcagtggttgcaaagtcagctcaatatgacggtcgcggagatcgtcgaaagggaagagtgggcgggatttcgcgccagagaaacggcggcgctggaagcggtaactgcgccatccaccgttatcgctacaggcggcggcattattctgacggaatttaatcgtcacttcatgcaaaataacgggatcgtggtttatttgtgtgcgccagtaagtgtcctggttaaccgactgcaagctgcaccggaagaagatttacggccaaccttaacgggaaaaccgctgagcgaagaagttcaggaagtgctggaagaacgcgatgcgctatatcgcgaagttgcgcatattatcatcgacgcaacaaacgaacccagccaggtgatttctgaaattcgcagcgccctggcacagacgatcaattgttgattttcgagcgcctatacttaacgttcatcccgtgaaataaggaagaacgatgccaacgaaaccgccttatcctcgtgaagcatatatagtgacgattgaaaaaggaaagccaggacagacggtaacctggtaccaactcagagccgatcatcctaaaccagacagcttgatcagtgaacatccgaccgctcaggaagcgatggatgcgaaaaaacgctatgaggaccctgacaaagagtgaccgcatcagactgctcggaagggattctgagtgccactacaagggatctgcgtcacatttttcataattcatgtttttctaataattagaatattaaacaataacaatccattactggaatcatttggaatctttacattatgccgtgcacgtctgctgctacgctttttgtcatttgtagcacaagtaagtgtcagcagtggtgcttcacacttgcccggtaattaacgacgaaagaaaagtaaggtggatgaacaatgagtgcgagcttggcgatcctgaccatcggcattgtacctatgcaggaagttttgccgctcctgacggaatacattgacgaagataatatttcccatcatagcctgctggggaagttaagtcgtgaagaagtgatggcggagtacgcgccagaagcaggcgaagacaccattctcacattattaaatgacaaccagctggcccatgttagccgtcgcaaagtggagcgtgacctgcaaggtgtggttgaagtgctcgataatcagggttatgacgtcattttattaatgagtacagcaaacattagtagtatgactgcgcgtaatacgatctttcttgagccgagccgaatattgcctccactggtttcctctattgttgaagatcatcaggtgggggttatcgttccggttgaggagatgctgcccgttcaggcgcaaaaatggcaaattttgcagaaaagcccggtatttagtttgggtaaccccattcatgatagtgaacaaaaaatcattgatgccgggaaagaattactggcaaaaggggctgatgtcatcatgctggattgtttaggatttcaccaacgtcatcgcgatttactgcaaaaacagctcgatgttcctgtcttgctgtctaacgtattgattgcacggctggctgcggaattactggtgtaattttgcgtgacagccagcgcctctggcccctatagtgaagtagatgttcaactaccaaacagggccagtttatgcttcaaagtaatgagtacttttccggcaaagtgaaaagtatcggcttttccagcagcagcactggtcgcgccagcgtgggtgttatggttgaaggcgaatacaccttcagcaccgctgagccggaagagatgacggtaatcagtggcgcgctgaatgtgttactgcctgacgcgaccgactggcaggtgtatgaagccggtagcgtgtttaatgttcccggtcacagtgagtttcatctgcaagttgccgaacccacctcttatctgtgccgctatctgtaattcctcgccttccccttgaacgggagggcatttttctgaaatatcctttctttagcccataataatatttcctttgctgcgattttttcaatttccgatatattcataatttatcaaggttgatataaatatcagtgaagatctccagatattgttgcggaactggctacgataaaagataaatcagatgatgaatggtggcgtgcattgctgcaaagtcgcaatgatcatttacgccaaacggcattgcgcaacgcacataccccggcgttgttgttaacgacattgactgagcctcaggatcggagcctggctattaataatccacagctggctgccgatgtgaaaacggcgtggttaaaagaggatccaagtttactcttatttgtcgaacaacccgatcttagcctgttacgtgatttagtgaaaaccggggcaacgcggaaaattcgcagtgaagcgcgtcaccggcttgaggaaaaacaatgacacaacgtccatggagcaagttacagcgtaaaacgcataatattgctgcgctaaaaattattgctcgccgtagcgaataattatatgcctggtgtggcttcgtacgccggataagacgcggcaggcgtcgcatccggcattaaaggaaaatcagcaattaacgttgtgcttcgccacctaatccttcaatcaggttttgaattaacgctgccagttcaccagtcatcaggatgaaatcggcatcaaaacgctgggcgaaatcttcacggtcgatatcttcgttttgatcgcgcagctcgtcgcagaacttcagacgcttgaggctaccatcgtcgcacatcacaaactgaatgcgctgctgccagtcgagcgccagtttagtcaccacttttccggcttcaatgtgattggtgatctcttcgctggtcagatcttgtttcttcgcgcggatcacgccgccatcttccagcaagcttttcagctcggcttcatcaagcagctggaagccctgtgccgcactgccggagcgaacccattcggtcagcgtcagttcaatcgggttttccatgctcaatggtacaaccggtaagctccccaggcttttacgcagtaatgccagcgtatcttccgcttttttggcactggcgcagtccaccataatcaaaccgttaaccgtgtcgatccacatcattgtctggctaaaacggctgaaagcacgcggcagcagagagtgcagcacttcgtctttcaggctatctttttcggttttcttcagcttacgcgcctgttccgcttccagtttggcgattttcgcttccagcgcctgtttaatcaccggagacgggaggattttttcttctttgcgcgcgcagataacaatttgaccattggcaacgtgcgttaacgcatcgctgtggcttcccatcggaggaacccagcccatcttcgccatgtcctggctgccgcatggggtaaatgccatgctggctagctgtttttccatctcttctgcacgcaggctaatctcgcggctaagacggtaaaccattaaatttttgaaccacagcatgataatttccacggccttgtcgttaaatttagcgggcatgataacgaattgtcggcggccttgcattgccaatccggttgtccgtctctacgctattgatattgaaaaaaataaggagagtaccgtgcgtataggtatcgatttaggcggcaccaaaactgaagtgattgcactgggcgatgcaggggagcagttgtaccgccatcgtctgcccacgccgcgtgatgattaccggcagactattgaaacgatcgccacgttggttgatatggcggagcaggcgacggggcagcgcggaacggtaggtatgggcattcctggcagtattagcccttacaccggtgtggtgaagaatgccaatagtacctggctcaacggtcagccattcgataaagacttaagcgcgaggttgcagcgggaagtgcggctggcaaatgacgctaactgtctggcggttagtgaagcagtagatggcgcggcagcgggagcgcagacggtatttgccgtgattatcggcacgggatgcggcgcgggcgtggcattcaatgggcgggcgcatatcggcggcaatggcacggcaggtgagtggggacacaatccgctaccgtggatggacgaagacgaactgcgttatcgcgaggaagtcccttgttattgcggtaaacaaggttgtattgaaacctttattagcggcacgggattcgcgatggattatcgtcgtttgagcggacatgcgctgaaaggcagtgaaattatccgcctggttgaagaaagcgatccggtagcggaactggcattgcgtcgctacgagctgcggctggcaaaaagcctggcacatgtcgtgaatattctcgatccggatgtgattgtcctggggggcgggatgagcaatgtagaccgtttatatcaaacggttgggcagttgattaaacaatttgtcttcggcggcgaatgtgaaacgccggtgcgtaaggcgaagcacggtgattccagcggcgtacgcggcgctgcgtggttatggccacaagagtaaaaaacgtaggcaattggcgcatcatgcctgatgcgacgcttgccgcgtcttatcaggcctacaaaaggtgccagaaccgtaggccggataaggcgttcacgccgcatccggcaataagtgctccgatgcctgatgcgacgcttgccgcgtcttatcaggcctgcaaaatgtgccagaaccgcgtagggcggataaggcgttcacgccgcatccggcaataagtaatgagcaccgagactataacttaccccagtggtttcgccagcaccggagtatccgccgcttgctggcgcttatagcgaccatacagcagcaagctgctcatcgcagcaaagctaagcagggcggcaggcagcgccacgtaattatatgccagccccagcgtcagcatcatacctccgcaatatgcgccgacggcgctaccgaggttaaacgctatttgcccacctgcggcacctaataactctccgcctttggcgttttgtagtaacaatatttgtagcggtgcactaagggcaaataatcccgcgcaacaaataaaagcaaaaataaggctcgttgttttcatgccgccgcagaaaaagagcatcagcagtgccagtacaattataaagtcagttactgctgcaatgcgcagtggactataacgtccactaatcctgccacttagcatatttcccagcaccatccctagcccaactaacatcataataaaggtcatcgccgtttcgctaaaaccggaaataaacatcatgtatggctttacgtagctgaaccaggcaaacacacctgcgttgccaaacatcgtggcggcgaaaattaaccacggggccgggctgcgcaaaaagtgaaattgttcgcgcagatttcctttcgcctcgtcgcgaatatctggcacccaaaaatagacgcttgccatcaccgcaatattaaaaacagcgatcaataaaaaggtgtaacgccagctaaattcctgacttaaatacgttcccagcggaatgcccagcaaattggcgactgtcatcccggaaaccatccccgccacggcggcggtgacttttccgggtttgataattttacttaacacgatcgctccgacgccaaaaaatgcgccatgcggaaagccggataccagccgaccaatggcgagcatcaggtaagagctagagagcgtgaacatggcgttgccaatgacgcacaacgccaccagaaacaacaagatatgtttgagactgtagcggctggaaaagagtgcgatgattggcgcaccgaccaccacccccagtgcataatagctgatcatatgcccggcggcaggaatgctaattcctacgttatgcgccagctccgtgagcacgcccataatgccaaattcggccatccccaaaccaaacgtgcccagagccaaagataaaatgacttttttcataccaccatcacaaccaccagaacggctaccaatcaccgtagccaataaagtgatagcttgcaggataacgaccagcaaggccaagagataattcgcccctctgtattcattatcctgctgaatagttatttcactgcaaacgtactttccagtttgctgtagcccaggccgttgatctttttcactttgatctgcaccggaatacgctctttcatcgcttctacgtggctaatcacaccgatggttttgccactggcgttcagggcatccagcgcatcaagggcggtatccagcgtttcgctatccagcgtgccaaaaccttcatcaaggaacaggctgtcaatacgtgttttatggctgaccagatcgctaagcgccagcgccagcgccagactaacgaggaaactttcgccgccggaaagggtacgggtatcgcgtaccgcatctgcctgccaggtatcaacaacctcgacttccagcgcctcgctggctttgcgctgtaacagatagcgcccgtgcagccgggtaagttgctgattagcgagatggactaaattatccagcgtcagcccctgggcaaacttgcggaatttatcgccctctttggaacctattaggctattcagatatccccagtcctcaacctgctgcgtcatttgagcaatttgctgcattaaggtttgttgttgctgacggttatctgcatcctgcttcagctgctggcgaatctcgccttgactcgtggtgttttcacgcaacttttggtgagtttgcgctaactcttgctgaatctgctccaccgtcacagtgagagccaacccgtcgtcaggtcggtgttgttgatgctgtgccagcgtttctgctgtctgagtgaccagagtttgcgcctgacggcgctggttttccagattctgcttgagctgttccagctgcgttagtgtttgttcatccattagcgccgcaaggaacgcctgctgatcgtcaaagacgctggcctgtagcgcggtgtcaaactgcgcctgggctttttgcagactttgcgccgccagaacatcctgttgctgtaacgtctgctgctggctgtgtaatgcgagacattgttcatgtacctgccgccagttttccaataccacagtttcttcgcagtgcgggagttcatcactttgcggcaacgtttccagaatcggcgtcagctgctgaatacggttttgcagcgcggttaattcgttctggcgttgctgccagctctgcgcttcttgctgacgtgtcgccaaccagctctcttcttcatcttcctgtggcaatgtcagtgcataacccgtcaatgtcgttaaaagtagttgctggcgttgttcaatttgctgttgatactggataatttgctgattatgcgcggcaatctgcccttgtaattcatgccgttggctgagtaaccgcagctggcgttcgtgctcatcttgtgcatccagccacggttgaatatcgtccagtggctgcaaggtgatattgaggctggccgtgacggcttgccattgttgagtaagtgcttgctcatcttgtcggaggctttgcgcttcgttttcatcacgctgaagctgctttgttatggcgtccagttgcccacgtagcgtcgcaccttcttcaccgagctttttaacttcgttttccagcgccagtaatcgagactgattaacgccaggctccagcgcctgatacgcctcgaccgccgggtggctggtggaaccacaaagtgggcaaggctgacccgcctgtaactgtgcacgttgagcttccagcgttttgatgcgcgcttcctgctcgcaaatggttttcacatcggcaagttgctgcgtcttttctttataacgctggcgcatttcgttaagtgcggcgttacgttgcgtctgttcttgcgtgacattctggatagcgacctgtaactgcgccagacgtttttgttggggaacaatctgtccatgcagcgcgaccaggtgctgacgcagtgggcgttgctcagcatgttgcgccagggcggtagcaacttcatcggcggttaacgtcaacgtgatcgccgcaagcgcattaagtttttgctcagcatgggttaactgttgctgccattgccgcagatgctcgcgatcgctggtttgttgggagaactgcgcacgccaacccgccggttcgttgttccactgacggaagcggtcgtgttcctgtaaccaggtattcaggctttgttgctgctgctgtaattctgcactctgcttcgccgcgtggtggcgaatgctcgcgcgaagcgccattgtgctctgtaagcgagtatttacttcttcaatctgctggcgaatatgcgccagcgccgcgctgtgttctgcgatgcgttcccagtgtggacgaagatttcgtgccggttgtgccagactaagcgccgccagttgaggttgcgctttttcttcttcggctaacgcctgttgcaaggcctgctgacggcggctggcttcttgctgcaattcgtcctgacgcgttaaccagtttaggctttgttgttcttgctgctgcgcggtaattaactgtttttcttcgtcagtaagtacctgcaaactcgctgtcaggctttgcacttgttccggcgtgagcaacgtgacgccgctggcctgcgcttgcagcttctccagctctgtgcgggcgcttttgtgctgctcaaaaaccatcgcgctgatttgcccgtagatttcagtgccggttaactcctcgagcaattccgcgcgttctttgggtttggcattcaggaaggcagcaaattgcccctggctaagcagcatgctacgggtgaagcgcccgtaatccagcccggttaacgtcgctgtcagttccagcttatctttcactttgtcggcgagaattttgccgtcggcgcagcgcgccagctctacgcgtggcacctgcaaattaccgtcgggttggttacgcgcccgattctggctccagaatgcacggtacgcttcacctttcacttcaaactccacctccgccagacattcggcggtatcgcgggtcatgagatcattttggctttgactaacgttagagagacgcggagtttcgtgatacagcgccagacaaatggcgtccagcagggtggttttccccgcacctgttgggccggtaatagcaaacagcccgttgctggcgaacggctcgcgggtgaaatcaatcttccattcgccttttaaactgttcaggtttttcaggcgcaggctgagaattttcatgcttcgtgttctccggcgagggtatgcaacgtcgtggtgaaaagatgctgcagacgttgctgctggctttcatccagttcttccagtgccagacggcgattgaacacctcttcgacgctgagttcgctgagggtttcacgctgttggctggctaacacacgctcgcgctgttcacgactccgacgtaccagcaatacttcgacaggcaaactttcggttaatgcctggattttgcgctgaatatcatgcagatactcatcagtagtgatttcgatatccagccagacaggtggctcctggcttacatcgcgccactgttccagctgtgcggtaatgctcgccagatcgcctttcagcactgccatgggttgcgttaccggtacgttcaggttttccacgctctctaatttgccgttactaaatgtcaccagatggacatatttactcttaccgcattcatcaaaactcagtggaatgggggagccgcaatagcgaacatgttccatgccgccaataatctgtgcgcggtgaatatgcccgagcgcgatgtagtcggctggtggaaagttttgtgccggaaacgcgtccagcgtgccaatataaatgtcacgcacggcgtcacttttactggcccccacggtcgttaaatgtcccgtggcgatgatgggcagaggctgatcgccgcgcagtttgcaggcatcggcatagtgttgttggtaataatcggtaatcgctgccagtaaatgctgctgtttttcaataccgttaagccccgcctggctggtaataatgtcacgcggacgtaaaaacggaatggggcacagcactgcgcctggcgtcccgtcgcgacgaggcaagatttgcggcgcatgtccggcgctggcgaccacggtagtattgaggaacgccatgatatcgcggctttcattcagcgtggcgacgctgtcatggtttcctgccagtaccaccagatgacagccagtttgctgtaaattgacaacaaaacggttgtataacgtgcgggcgtaactgggcgggctgccggtatcgaaagcatcaccggcaacaataatcgcatccacctgatgggtttgtgctgtctccagcagccagtcaagaaaagcctgatgttcagcttcgcggcttttactgtagaagttctggccgagatgccagtcactggtgtgaaggatgcgcataacggttccctggcgaaaaagcatgggcgcgattatacccaaacagatgtgccatttgcttttttctgcgccacggaaatcaataacctgaagatatgtgcgacgagcttttcataaatctgtcataaatctgacgcataatgacgtcgcattaatgatcgcaacctatttattacaacagggcaaatcatggcgagacgtattctggtcgtagaagatgaagctccaattcgcgaaatggtctgcttcgtgctcgaacaaaatggctttcagccggtcgaagcggaagattatgacagtgctgtgaatcaactgaatgaaccctggccggatttaattctcctcgactggatgttacctggcggctccggtatccagttcatcaaacacctcaagcgcgagagcatgacccgggatattccagtggtgatgttgaccgccagaggggaagaagaagatcgcgtgcgcggccttgaaaccggcgcggatgactatatcaccaagccgtttagcccgaaggagctggtggcgcgaatcaaagcggtaatgcgccgtattagcccaatggcggtggaagaggtgattgagatgcagggattaagtctcgacccgacatctcaccgagtgatggcgggcgaagagccgctggagatggggccgacagaatttaaactgctgcacttttttatgacgcatcctgagcgcgtgtacagccgcgagcagctgttaaaccacgtctggggaactaacgtgtatgtggaagaccgcacggtcgatgtccacattcgtcgcctgcgtaaagcactggagcccggcgggcatgaccgcatggtgcagaccgtgcgcggtacaggatatcgttttagtacccgcttttaacgccttgctcatcggacgcagagcagggcttatgatttcttaactggagtatcttacgtgctggaacggctgagctggaaaaggctggtgctggagctgctactttgctgcctcccggctttcatcctgggtgcattttttggttacctgccctggtttttgctggcaagcgtaacaggactgcttatctggcatttctggaatttattgcgccttagttggtggctgtgggtggatcgcagtatgaccccgccaccggggcgtggtagctgggaaccgctactatacggcttacaccagatgcagctgcgaaataaaaaacgccgccgtgaactgggcaatctgattaaacgctttcgtagcggcgcggagagcctgcccgacgcggtggtgctgaccacggaagagggcggtattttctggtgtaacggtctggcgcaacaaattcttggtttgcgctggccggaagataacgggcagaacatccttaacctactgcgttacccggagtttacgcaatatctgaaaacgcgtgatttttctcgcccgctcaatctggtgctcaacaccgggcggcatctggaaattcgcgtcatgccttatacccacaaacagttgctgatggtggcgcgtgatgtcacgcaaatgcatcaactggaaggggcgcggcgtaacttttttgccaacgtgagccatgagttacgtacgccattgaccgtgttacagggttacctggagatgatgaatgagcagccgctggaaggcgcggtacgcgaaaaagcgttgcacaccatgcgcgagcagacccagcggatggaaggactggtgaagcaattgctgacgctgagcaaaatagaagccgcaccgacgcatttgctcaatgaaaaggttgatgtgccgatgatgctgcgcgttgttgagcgcgaggctcagactctgagtcagaaaaaacagacatttacctttgagatagataacggcctcaaggtgtctggcaacgaagatcagctacgcagtgcgattagcaacctggtctataacgccgtgaatcatacgccggaaggcacgcatatcaccgtacgctggcagcgagtgccgcacggtgccgaatttagcgttgaagataacggaccgggcattgcaccggagcatattccgcgcctgaccgagcgtttttatcgcgttgataaagcgcgttcccggcaaaccggcggtagcggattagggttagcgatcgtgaaacatgctgtgaatcatcacgaaagtcgcctgaatattgagagtacagtaggaaaaggaacacgtttcagttttgttatcccggaacgtttaattgccaaaaacagcgattaatccgcctttgtcatcttttattgccataagccagtcgatgctggcttattttctttgcagtcaaaatacgggcgttagattttacaacgattggtgattttttgttcgcatgattagccatgtctttttcacggaaatagtgttttatactggttggtgatttcttatcgctatatacctctggtttttagatccctccttgctttaaaacgttataagcgtttaaattgcgcttcaggtgctgtcatactgactgcattaacgcggtaaatcgaaaaactattcttcgccgcgcctggttgggagtatttcccgctaaaattgtttaaatataccgctgtatcatccccagggattggcacaaaaatttaacgttacaacaccacatccacaggcagtatgatttatgacccatcaattaagaagccgcgatatcatcgctctgggctttatgacatttgcgttgttcgtcggcgcaggtaacattattttccctccaatggtcggcttacaggcaggcgaacacgtctggactgcggcattcggcttcctcattactgccgttggcctgccggtattaacggtagtggcgctggcaaaagttggcggcggtgttgacagcctcagcacgccaatcggtaaagtcgctggcgtactgctggcaacggtttgttacctggcggtggggccgcttttcgctacgccgcgtacagctaccgtttcctttgaagtggggattgcgccgctgacgggtgattccgcgctgccgctgtttatctacagcctggtctatttcgctatcgttattctggttagcctctatccgggcaagctgctggataccgtgggcaacttccttgcgccgctgaaaattatcgcgctggtcatcctgtctgttgccgctattgtctggccggcgggttctatcagcacggcgactgaggcttatcaaaacgctgcgttttctaacggcttcgttaacggctatctgaccatggatacgctgggcgcaatggtgtttggtatcgttattgttaacgcggcgcgttctcgtggcgttaccgaagcgcgtctgctgacccgttataccgtctgggctggcctgatggcgggtgttggtctgactctgctgtacctggcgctgttccgtctggggagtgacagcgcgagcctggtcgatcagtctgcaaacggcgctgctattctgcatgcttacgttcagcacacctttggcggcggcggtagcttcctgctggcggcgttaatcttcatcgcctgcctggtaacggcagttggcctgacctgtgcttgtgcagaattctttgcccagtacgtaccgctctcttatcgtacgctggtgtttatcctcggcggcttcagcatggtggtttctaacctcggcttaagccagctgatccagatctccgtaccggtgctgaccgctatttatccgccgtgtatcgcactggttgtattaagttttacacgcagttggtggcataatagctcccgcgtgattgctccgccgatgtttatcagcctgctttttggtattctcgacgggatcaaagcatctgcattcagcgatatcttaccgtcctgggcgcagcgtttaccgctggccgaacaaggtctggcgtggttaatgccaacagtggtgatggtggttctggccattatctgggatcgcgcggcaggtcgtcaggtgacctccagcgctcactaaatcactgaacatttgttttaaccacggggctgcgatgccccgtggttttttattgtgttgatgggttaggaattgatggaaagtaagaacaagctaaagcgtgggctaagtacccgccacatacgctttatggcactgggtagtgcaattggcaccgggctgttttacggtagcgcagacgccatcaaaatggccggtccgagcgtgttgttggcctatattatcggtggtatcgcggcgtatatcattatgcgtgcgctgggggaaatgagcgtacataacccggccgccagctctttcagccgttatgcgcaggaaaacctcggcccgctggcaggttacattaccggctggacctactgctttgaaatccttattgtcgccatcgccgatgtgaccgcttttggtatctatatgggtgtctggttcccgacggtgccgcactggatttgggtactgagcgtggtgctgatcatttgcgccgtaaacctgatgagcgtgaaggtattcggtgagctggaattctggttcagcttctttaaagtcgccaccatcatcatcatgattgtcgccggtttcggcatcatcatctgggggattggcaacggcgggcaaccgaccggtattcataacctgtggagcaacggcggcttcttcagtaacggctggcttggcatggtaatgagcttgcaaatggtgatgtttgcttacggtgggatcgaaattatcgggattaccgccggtgaagcgaaagatcctgagaaaagcataccgcgtgcgattaactccgtgccgatgcgtattctggtgttctacgtcggtacgctgttcgtcattatgtctatctacccgtggaatcaggttggcactgccggtagcccgttcgtgctgacgttccagcatatgggcattacctttgccgccagcattcttaactttgttgtgctgactgctagcctgagcgcaattaacagtgatgtatttggcgtaggccgtatgctccacggtatggcagagcagggcagcgcgccgaaaattttcagcaaaacgagccgtcgcggtattccgtgggttacggtgctggtgatgactaccgcgctgctgtttgcggtgtatctgaactacatcatgccggaaaacgtcttcctggtgatcgctagcctggcaaccttcgccacggtgtgggtgtggattatgatcctgctgagccaaattgccttccgtcgccgtttgccgccagaagaagttaaggcgctgaaatttaaagtgccgggtggggtagcaacgaccatcggcgggctgattttcctgctctttattatcgggttgattggttatcacccggatacgcgtatcagcctgtatgtcggtttcgcgtggattgttgtgctgttgattggctggatgtttaaacgccgccacgatcgtcagctggctgaaaaccagtaatccttgcgttctgtaagccggttcaggaggaaatcctgatccggctattccgaaagttatccgcccccgtcctcctcccccaaatatccttcagatgatgagtgatcctgcattaggctatggcaaggtgatcagattttcatcacaggggaattatgatgttaaatgcatggcacctgccggtgcccccatttgttaaacaaagcaaagatcaactgctcattacactgtggctgacgggcgaagacccaccgcagcgcattatgctgcgtacagaacacgataacgaagaaatgagtgtaccgatgcataagcagcgcagtcagccgcagcctggcgtcaccgcatggcgtgcggcgattgatctctccagcggacaaccccggcggcgttacagtttcaaactgctgtggcacgatcgccagcgttggtttacaccgcagggcttcagccgaatgccgccggcacgactggagcagtttgccgtcgatgtaccggatatcggcccacaatgggctgcggatcagattttttatcagatcttccctgatcgttttgcgcgtagtcttcctcgtgaagctgaacaggatcatgtctattaccatcatgcagccggacaagagatcatcttgcgtgactgggatgaaccggtcacggcgcaggcgggcggaagtacgttctatggcggcgatctggacgggataagcgaaaaactgccgtatctgaaaaagcttggcgtgacagcgctgtatctcaatccggtgtttaaagctcccagcgtacataaatacgataccgaggattatcgccatgtcgatccgcagtttggcggtgatggggcgttgctgcgtttgcgacacaatacgcagcagctgggaatgcggctggtgctggacggcgtgtttaaccacagtggcgattcccatgcctggtttgacaggcataatcgtggcacgggtggtgcttgtcacaaccccgaaagcccctggcgcgactggtacagctttagtgatgatggcacggcgctcgactggcttggctatgccagcttgccgaagctggattatcagagcgaaagtctggtgaatgaaatttatcgcggggaagacagtattgtccgccactggctgaaagcgccgtggaatatggacggctggcggctggatgtggtgcatatgctgggggaggcgggtggggcgcgcaataatatgcagcacgttgccgggatcaccgaagcggcgaaagaaacccagccggaagcgtatattgtcggcgaacattttggcgatgcacggcaatggttacaggccgatgtggaagatgccgccatgaactatcgtggcttcacattcccgttgtggggatttcttgccaataccgatatctcttacgatccgcagcaaattgatgcccaaacctgtatggcctggatggataattaccgcgcagggctttctcatcaacaacaattacgtatgtttaatcagctcgacagccacgatactgcgcgatttaaaacgctgctcggtcgggatattgcgcgcctgccgctggcggtggtctggctgttcacctggcctggtgtaccgtgcatttattacggtgatgaagtaggactggatggcaaaaacgatccgttttgccgtaaaccgttcccctggcaggtggaaaagcaggatacggcgttattcgcgctgtaccagcgaatgattgcgctgcgtaagaaaagtcaggcgctacgtcatggcggctgtcaggtgctgtatgcggaagataacgtggtggtatttgtccgcgtgctgaatcagcaacgtgtactggtggcaatcaaccgtggcgaggcctgtgaagtggtgctacccgcgagtccgtttctcaatgccgtgcaatggcaatgcaaagaagggcatgggcaactgactgacgggattctggctttgcctgccattagcgctacggtatggatgaactaacgttttataacgccttgcgactcgcctgcgccatcatccgcggataaaactgccagaagcgggtttcgagggcgtcataatgagcgtctaaatcgtaccaggagtcacgcagggcatccagacgtgggcggcggcttgccatgccgtttaacacgttctggatgaaatccatatcgcgatagcgcaccagccactgctcactccacaagtaattgttcagattgataaaacgtggcggactgtccggcaaaatcgtcatcacttgctcgcgggcataacagacaaattcctgtagcggaaagtccgggctcagctggctccagtggcgggaaagaaagtgatcccacatgacatccagcgtaataggcgcaacgcggcgcgtttcactacgaaaccactcccgtgcttcgcggacttccggcagattgtcagtcaatacgtcgatacgtcgatgcatatgaatgccagccacgacgtcgggcggaaaactttcttcaggatttccgcgtacgaaatcagccagtaaattgccggaaaggctgctttccgcgagatgggctaaatgcaggtgagctaaaaaattcatcgattatattctatccaaaagggggtaaaggttgcagggagagcgccccggcactagactacccgcctcttattttagtctgagtcagtgtcatgcgcgttaccgatttctcctttgaattgcccgaatccctgattgcccactatcccatgcctgaacgcagtagctgtcgtttactgagcctggacgggccgacgggcgcgctgacgcacggtactttcaccgatttacttgataagctcaaccccggcgatcttctggtttttaataatacccgcgtgatcccggcgcgcctgtttgggcgtaaagccagcggcggcaagattgaagtgctggttgaacggatgctcgacgacaaacgcattcttgcgcatattcgcgccagcaaagcgccaaaacctggcgcagaactgctgctgggcgatgacgaaagtattaacgcaacaatgaccgcgcgccacggcgcactgtttgaagtcgaatttaatgatgaacgcagcgtgctggatattctcaacagcatcggccatatgccgctgccgccgtatatcgaccgtccggacgaagacgctgaccgcgaactttatcaaaccgtttatagcgaaaaaccgggcgcggttgcagccccgaccgcaggtctgcattttgacgagcctttgctggaaaaattgcgcgccaaaggcgtggagatggcgtttgtgacgttgcacgttggtgcgggcaccttccagccggtgcgcgtcgacaccattgaagatcacatcatgcacagcgaatacgctgaagtaccgcaggatgtggtagacgcggtactggcggcgaaagcgcgcggtaaccgggtgattgcggttggcaccactagtgtacgtagcctggaaagcgcggctcaggcagcgaaaaacgatctcattgaaccgttcttcgacgatacccaaatctttatctatccgggcttccagtacaaagtggtcgatgcgctggtgacgaacttccacttgccagagagcacgctgattatgctggttagcgcctttgccggttatcaacacaccatgaacgcctataaagcagcggtagaagagaaatatcgcttttttagttacggtgatgcgatgtttatcacgtacaatccgcaggcaattaatgagcgcgtcggggagtaattccgcggcgctggtttaaaacgttggactgtttttctgacgtagtggagaaaaaatgaaatttgaactggacaccaccgacggtcgcgcacgccgtggccgcctggtctttgatcgtggcgtagtggaaacgccttgttttatgcctgttggcacctacggcaccgtaaaagggatgacgccggaagaagttgaagccactggcgcgcaaattatcctcggcaacaccttccacctgtggctgcgcccgggccaggaaatcatgaaactgcacggcgatctgcacgattttatgcagtggaaggggccgatcctcaccgactccggcggcttccaggtcttcagccttggcgatattcgtaaaatcaccgaacagggcgtgcacttccgtaacccgatcaacggcgatccgattttcctcgatcctgaaaaaagtatggagattcagtacgatcttggtagcgatatcgtcatgatctttgatgagtgtacgccgtatcctgctgactgggattacgcaaaacgctccatggagatgtctctgcgttgggcgaagcgtagccgtgagcgttttgacagtctcggaaacaaaaatgcgctgtttggtatcatccagggcagcgtttacgaagatttacgtgatatttctgttaaaggtctggtagatatcggttttgatggctacgctgtcggcggtctggctgtgggtgagccgaaagcagatatgcaccgcattctggagcatgtatgcccgcaaattccggcagacaaaccgcgttacctgatgggcgttggtaaaccagaagacctggttgaaggcgtacgtcgtggtatcgatatgtttgactgcgtaatgccaacccgcaacgcccgaaatggtcatttgttcgtgaccgatggcgtggtgaaaatccgcaatgcgaagtataagagcgatactggcccactcgatcctgagtgtgattgctacacctgtcgcaattatagtcgcgcttacttgcatcatcttgaccgttgcaacgaaatattaggcgcgcgactcaacaccattcataaccttcgttactaccagcgtttgatggcgggtttacgcaaggctattgaagagggtaaattagagagcttcgtaactgatttttaccagcgtcaggggcgagaagtaccacctttgaacgttgattaatattaataatgagggaaatttaatgagcttttttatttctgatgcggtagcggcaacgggtgcaccggcgcaaggtagcccgatgtctttgattttgatgctggtggtattcggtctgattttctatttcatgatcctgcgtccacagcagaagcgcaccaaagaacacaaaaagctgatggactccattgccaaaggtgatgaagttctgacgaacggtggcctggttggtcgcgtaaccaaagtagcggaaaacggctacattgctatcgcgctgaatgacaccactgaagtagttattaaacgtgacttcgtagctgccgtcctgccgaaaggcaccatgaaggcgctgtaattaaaatttttccctaagggaattgccgtgttaaaccgttatcctttgtggaagtacgtcatgctgatcgtggtgattgtcatcggtctgctgtatgcgcttcccaacctgtttggtgaggatccggctgttcagatcactggtgcgcgcggagtcgccgccagtgagcaaacgctgatccaggtccagaaaacgttacaagaagaaaaaataactgctaagtctgtggcactggaagagggcgctattcttgcgcgcttcgactccactgacacccagttgcgcgctcgtgaagcattaatgggcgttatgggtgacaaatacgtcgtggcgcttaaccttgccccggcaacgccgcgctggctggcagctattcacgctgagccgatgaagctcggccttgacctgcgtggcggcgttcacttcctgatggaagtggatatggacaccgcgcttggcaaactccaggaacaaaatatcgatagcctacgcagtgacctgcgcgaaaagggcatcccgtataccactgttcgtaaagaaaacaactacggcctgagcatcactttccgcgatgctaaagctcgtgatgaagccattgcgtatctgagcaagcgccatccggacctggtgattagcagccagggcagcaaccagctgcgtgcggtaatgagcgatgctcgtctgagtgaagcgcgtgaatatgcggtgcagcagaacattaatatcctgcgtaaccgtgtaaaccaacttggcgtggcggagccggtggttcagcgtcagggtgctgaccgtatcgttgttgaactgccaggtattcaggacactgcgcgtgcgaaagagattctgggtgcgacggcaacgctggaattccgtctggtaaacaccaacgttgaccaggccgctgcggcatccggtcgcgtaccgggcgactctgaagtgaaacagacccgcgaaggtcagccagttgtgctgtacaaacgcgtaattctgaccggtgaccatatcaccgactccacttccagccaggacgaatacaaccaaccgcaggttaacatcagcctcgatagcgctggtggtaacatcatgtctaacttcactaaggacaacatcggcaaaccgatggcaaccctgtttgtggagtacaaagacagcggtaagaaagatgcaaatggtcgtgcggttctggtgaaacaggaagaggtgattaacatcgccaacatccagtctcgtctgggtaacagcttccgtatcaccggcatcaacaacccgaacgaagcccgtcagctgagtctgctgctgcgtgccggtgcgttgatcgcgccgattcagattgttgaagaacgtaccattggcccaaccctgggtatgcagaacattgaacaggggctggaggcttgccttgccggtctgctggtttctattctgttcatgatcatcttctataagaagtttggtctgattgcgaccagtgctctgattgccaacttgatcttaatcgtcggcattatgagcctgttgccaggcgcaacgctgagtatgccaggtatcgcgggtatcgtcttaacccttgcggtggcggtcgatgcgaacgtactgatcaacgaacgtattaaagaagagttgagcaacggacgtactgttcaacaggcaattgatgaaggttatcgtggcgcattcagttctatcttcgatgcgaacatcaccacgctgattaaagtcatcatcctgtacgcagtgggtaccggggcaattaaagggttcgcgattactaccggtatcggtgtggcgacgagcatgtttaccgcgattgtcggtacgcgtgccatcgtaaacctgctatatggcggcaagcgcgtcaagaagctgagtatctgaggagtgcgatgtggcacaggaatatactgttgaacaactaaaccacggccgtaaagtctatgactttatgcgctgggactactgggctttcggcatctctggtctgctgttaatcgctgctatcgttattatgggcgtgcgcggctttaactgggggctggatttcaccggtggtacggttattgaaattacgctcgaaaaaccggctgaaattgacgtaatgcgtgatgcattgcaaaaagccggttttgaagagccgatgctgcaaaactttggtagcagccatgacatcatggtccgtatgccgcctgctgaaggcgaaaccggcggtcaggtgttgggcagccaggttctgaaggtgattaacgaatccaccaatcagaatgcagcagtgaagcgtattgagttcgtcggtccgagcgtgggggcagaccttgcgcaaaccggtgcgatggcgttgatggcagcgctgctgtctatcctcgtgtacgtaggtttccgctttgagtggcgactggcggcaggggtggttattgcgctggcgcacgacgttatcattacgctgggtattttgagcttattccatatcgagattgacctgaccattgtggcaagcttgatgagcgttatcggttacagccttaacgacagtatcgtggtaagcgaccgtattcgtgaaaacttccgcaagatccgtcgcggtacgccttacgaaatctttaacgtgtccttgacccagacgctgcaccgtaccttgatcacatccggtactaccttgatggttatcctgatgctgtacctcttcggtggtccggtactggaaggcttcagcctgaccatgcttatcggtgtttccatcggtactgcatcttccatctatgtggcatctgcgttggctctgaaactgggtatgaagcgcgaacacatgttgcagcagaaagtggaaaaagaaggggcggatcagccgagtattctgccgtaatcaagttcccgttgatgttgaaaatcccggtcagaagatcgggattttttttgatgtatggagattgcgaaaatccccgcatcttgggaaactgcgcgtaaccctacatttcatccaggtaacttttcatggctatcatcccaaaaaactatgcgcggttagaaagcggctatcgcgaaaaagcattaaaaatctatccgtgggtctgcggtcgctgttcccgcgagtttgtttattccaacctgcgtgaacttaccgttcaccacattgatcacgaccataccaataacccggaagatggcagtaactgggaattgttgtgtctctattgccacgatcatgagcatagcaaatataccgaagcggatcagtatggtacgaccgttatcgcaggggaagatgcgcagaaagatgtcggtgaagcgaagtacaacccattcgctgacctgaaagcgatgatgaacaagaagaagtgattaaaacgtaaaattgcctgatgcgctacgcttatcaggcctacgttatttcagcaatatattgaatttacgtgcttttgttggccggacaaagcgtttacgccgcatccggcatgaacaaagcacacgttgttaacaatcagaaatgccgggaataaatcccggcattttcataatcagaagttgtaacctactaccaggtaaccaccccagccggtagagcgaacgttgaagttgccgttgccgaagttcagttctgcatcgtcgttccactgaccaccgtcgtgccagtaacgagctacgacagagtagtgccagtgatcgtagttcagagccagaatatggctggaagcgatagagttattagtacgggtcttaataccgttgattgcgttaccgctgtcatcccctaaatcggaaccccagtcgaagttggtgaagccgatgtagctcagctgaccgccccacagatcggtaatcggcacaaagtatttaattttgaaacggtaaccgtcccactcgttttcgttcgctgcgccatagttctgccactggtatttcgcatagacgttcatggacaggctcatcggcaggccagtgtcgatatcggtacccagacccatgtaccaggtgctctggcgaccatctttattacgacccatgtcgtaaatgtagttgttcgcgaagtaccactctttgaacggaccgaagctaaggtcagtattggtcagcttgtcgatggagaaacgtggttcgatttccataaacagcggagaaccgtggttccagatacctttagcatcggagttaccgccgaagaataccggcgcatccgcataaccatagaagtcgaaccagtcttttttagcgaatgcttcgtactcaaggtaggtatcgttgcggatctgcggtccgaaacgggtgtgatagcttccgacaacgttaacgctctggtgccaccagtcggaaagatactgcggtttgtcgttttcagctgcgttgacagtaaaagagctagagagcgccagtaccgcaccggctgccagtaatgtttttttcatatgtatgccactgtttgaaaatcccttgcgggagtgaaaaaggcgcaaattgcgtttctaaatatttcgtatacagaggagcctattataaaaatcattgctcacaaaaatatgtttcgtttcacagttctatcatttacgtaatcgattgcgttcacgtttacacacattcgggcggggattgtactgactttcgcccttgttgcaaacttttactatcaatccaggtgatgtaagcagagtaacaaaatgacggggaaagatgttgcgggacgcacaaaatcgtcccgaaatacgtttactgcataacaggttgaatgtcgtggatacgtacaaagcctaactgatccacagaaatcccctttaactgtaacggaatatcaacatcgctgggggcgaggacgctggcaggggcattaatcaattgattctgcacattgatttcctgaaagttgtctattgttccctgaatttgcccatattcaacagttccgctgaatgcgggcaagggatcattgctctcaccctgaatacgtagtgtaagggtggtgccatctgcatcaggcgtaatattcaccaggctcatacgtaaagtaccgatctggctttccagtcttgccggtgttttcgctccaggcagaaggtaaaccccactgctggattttgcattcagcctgttttgctgagtgattttgactgtttcttgattgagttgcgtcatctcctggttcagcgtgctgacgctgtgtttcatctgtcgcacttcactttgctgcacacaggcgctaaggctgaacaggcttcccagcaggagcagtcgaaaaacgttagtattcataggtcgtccctttctcgtcgcaattagcctaatggtagagggtaaaagcagcgaaagcatcgatcctttatctcaaaagcgttgcgcctttgttgtatcgtcagttcagggtaaaatagatttccgttaaccacctggtcaggacgccgtatgcattgcccattctgtttcgccgtggacactaaggtaattgactctcgtctcgtgggcgagggtagttccgtacgccgccgtcggcagtgtctggtgtgtaatgaacgtttcaccacctttgaagtggcggagctggttatgccgcgtgttgtaaaaagcaacgacgtgcgtgaaccgtttaatgaagagaaattgcgtagcggaatgctgcgggcgctggaaaaacgtccggtgagttccgatgacgtcgaaatggcaatcaatcatattaaaagccagctgcgcgccaccggtgagcgcgaagtgccgagcaagatgattggcaatctggtgatggagcaattgaaaaagctcgataaagtcgcctatatccgttttgcctctgtctaccgcagtttcgaagatatcaaagaatttggcgaagagatcgcgcgcctggaggactaagccgtgcaggacgagtattacatggcgcgggcgctaaagctggcgcaacgaggacgttttaccacgcatcccaacccgaatgtcgggtgcgtcattgtcaaagatggcgaaattgtcggtgaaggttaccaccaacgtgcgggtgaaccacatgccgaagtacacgcgttgcgtatggcgggtgaaaaagccaaaggtgcgaccgcctatgtcacactcgaaccctgtagccatcatggtcgtacgccaccgtgctgtgacgcactcatcgccgctggcgtagcgcgcgtggttgccagcatgcaagatcctaacccgcaggtcgctgggcgtggactttaccgtctgcaacaggctggcattgacgtcagccacggcctgatgatgagtgaagccgagcaattgaataaaggctttctcaagcggatgcgcaccggctttccttatattcagttaaaacttggcgcaagccttgatggtcgcacggcgatggcgagcggcgaaagccagtggatcactagcccccaggcgcggcgtgatgtacaactactgcgcgcgcaaagtcatgccattttaaccagcagcgccacggtgctggcggatgatcctgccttaacggtgcgttggtctgaactggatgaacaaactcaggcgctctatccgcaacaaaatctccgtcagccgatacgtattgtgattgatagccaaaatcgcgtgacgccggtacatcgcattgtgcagcagcccggcgaaacctggttcgcgcgtacgcaggaagattctcgtgagtggccggaaacggtgcgtaccttgctgattccagagcataaaggtcatctggatctggttgtactgatgatgcaactgggtaaacagcaaattaacagcatctgggtggaagcggggccaacgctcgctggcgcattgctgcaggcgggtttagtcgatgagctgattgtctatatcgcacctaaactattaggcagcgacgcccgcggattatgcacgctgccagggcttgagaaattagccgacgccccccaatttaaattcaaagagatacgtcatgtaggcccggatgtttgcctgcatttagtgggtgcatgatctcccggctcgaaagggaagcagcgcacgaaatattatgctaaaatccgcccccctgcggggccatactcgaacccgaaggaagaaaatgaacattattgaagctaacgttgctaccccggacgctcgcgtcgccatcaccatcgcgcgtttcaacaactttatcaatgacagcctgctggaaggtgcaattgacgcactgaaacgtatcggtcaggtaaaagatgaaaacattaccgttgtttgggtgcctggtgcctatgagctgccgctggcggcgggtgcactggctaaaaccggtaaatacgacgcggtgattgcgctgggtacggttattcgtggtggcactgcccactttgaatatgtcgctggtggtgcaagcaacggcctggcgcatgttgcccaggacagcgaaattccggttgcttttggggttctgaccactgaaagcattgaacaagcgatcgaacgtgctggcaccaaagctggcaacaaaggtgcagaagctgcactgaccgcgcttgaaatgattaatgtattgaaagccatcaaggcctgaaattagtaaggggaaatccgtgaaacctgctgctcgtcgccgcgctcgtgagtgtgccgtccaggcgctctactcctggcagttgtcccagaacgacatcgctgatgttgaataccagttcctggctgaacaggatgtaaaagacgttgacgtcctgtacttccgtgagctgctggccggggtggcgactaataccgcatacctcgacggactgatgaagccatacctgtcccgcctgctggaagaactgggacaggtagaaaaagcagtactgcgcattgcgctgtacgaactgtctaaacgtagcgatgtgccatacaaagtggccattaacgaagcgatcgaactggcgaaaagcttcggcgcagaagacagccataagttcgtcaacggcgtactcgataaagcagcacctgtgattcgccctaacaaaaagtgatatccaggccggtagattcacggaagaccgttccatgatcgccggccttttcttttttacctgctgaggcataacgtatggcatgtggcgagttctccctgattgcccgttattttgaccgtgtaagaagttctcgtcttgatgtcgaactgggcatcggcgacgattgcgcacttctcaatatccccgagaaacagaccctggcgatcagcactgatacgctggtggcgggtaaccatttcctccctgatatcgatcctgctgatctggcttataaagcactggcggtgaacctaagcgatctggcagcgatgggggccgatccggcctggctgacgctggcattaaccttaccggacgtagacgaagcgtggcttgagtccttcagcgacagtttgtttgatcttctcaattattacgatatgcaactcattggcggcgataccacgcgtgggccattaagtatgacgttgggtatccacggctttgttccgatgggacgagccttaacgcgctctggggcgaaaccgggtgactggatctatgtgaccggtacaccgggcgatagcgccgccgggctggcgattttgcaaaaccgtttgcaggttgccgatgctaaagatgcggactacttgatcaaacgtcatctccgtccaagcccgcgtattttacaggggcaggcactgcgcgatctggcaaatagtgccatcgatctctctgacggtttgatttccgatctcgggcatatcgtgaaagccagcgactgcggcgcacgtattgacctggcattgctgccgttttctgatgcgctttctcgccatgttgaaccggaacaggcgctgcgctgggcgctctctggcggtgaagattacgagttgtgtttcactgtgccggaactgaaccgtggcgcgctggatgtggctctcggacacctgggcgtaccgtttacctgtatcgggcaaatgaccgccgatatcgaagggctttgttttattcgtgacggcgaacctgttacattagactggaaaggatatgaccattttgccacgccataaagatgtcgcgaaaagtcgcctgaagatgagtaatccgtggcatctacttgctgtcggattcggaagtggattaagcccgatcgttcctgggacgatgggcagcctggcagcgattccgttctggtatctgatgacctttttgccctggcagctctacagcctggtggtgatgctggggatctgtatcggcgtctatctttgtcatcaaacggcgaaagacatgggtgtgcacgatcatggcagcattgtctgggacgaatttattggtatgtggatcacgctcatggcgctgccgaccaatgactggcagtgggttgccgccgggtttgtgattttccgtattctggatatgtggaagccgtggccgatccgctggtttgatcgcaatgtgcatggcggcatggggatcatgatcgacgatattgtcgccggggtgatttccgcaggcatcctgtattttatcggtcatcactggccgctgggtattctgagctaattgtgcaccgatgcctgatgtgacgcttgtcacgtctcatcaggcctggactcttatttaaatcctacgacaggatgcggtttatacggcgtttccagttcggcaatctgttccggcttcaaagtgatatccaccgcgttcaatagctcatcaagctgttcttcgcggctagttccgataatcggtgcggcaatgcccggtttactcaacaaccaggccagcgcaacttgtgctcgtgtcgcccccagttcttcactgacgcctgttaaccgctctgcgatctgcgcgtcattttcatcgctttctttatagagatttttccccacctcatcagacaccagtcgtgcggtagtttctccccacggacgcgtcagacggccccttgccagcgggctccatggaattaccgccacgccctcctgataacacagtggtagcatctcgcgctcttcttcacgataaatcagattgtagtgatcctgcatactgacaaactgcgcccagccgtgctgtttttggagttccagtgcctgagcaaactggctagcgtgcatactactcgcgccgatataacgcgctttcccggcttttaccacgtcgttgagggcttccagcgtctcttcgatcggcgtgttgtaatcccagcgatgaatttgcaggatatcgacataatccatgccgagacgtcgcaggctgtcgtcgatagagcgcaaaatttgcgcacgggataatccttccggtaaatcaccaacgcgatggaacactttggtcgcaacgaccacgtcttcacgacgggcgaaatcccgcagtgcgcgaccgacgatctcttcgctgctgccgtcagaataactgttggcggtatcaaagaaatttatgccgccttccagtgcacgtttaattatgggacggctgctttcttccggcagtgtccatgcgtgattaccgcgatctggctcgccaaaggtcatacagccgaggcaaagtcgggaaacgcgaaggtcggtttttcctaaggggttgtattgcatgctgccactcctgctatactcgtcatacttcaagttgcatgtgctgcggctgcattcgttcaccccagtcacttacttatgtaagctcctggggcttcactcgtttgccgccttcctgcaactcgaattatttagagtctatgaataatttcttaagcatagcaggagtggagtagggattatgccagccaggccttgattttggcttccataccagcggcatcgaggccgagttcggcgcgcatttcttcctgagttccttgcggaataaagaagtccggcaggccaatgttcagcacgggtactggtttacgatgggccatcagcacttcgttcacgccgctgcctgcgccgcccataatggcgttttcttctacggtgaccagcgcttcatggctggcggccatttccagaattaacgcttcatcaagcggtttcacaaaacgcatatcgaccagcgtggcgttcaggctttcggcgactttcgccgcttctggcatcagcgtaccaaagttaaggatcgccagtttctcgccacgacgcttcacaatgcctttgccaattggtagtttttccagcggcgtcagttccacgccgaccgcgttgccacgcgggtagcgcaccgcactcgggccatcgttatagtgatagccggtatagagcatctggcgacattcgttttcatcgctcggggtcataatgaccatttccggtatgcagcgcaggtaagagagatcaaaagcaccctgatgggtttgaccgtcagcaccaacaatgcccgcgcggtcgatggcgaacaggaccggaagcttttgaatcgccacgtcatgcagcacctgatcataggcgcgttgcaggaaagtggagtaaatcgcgacaatgggtttgtacccaccaatcgccagacccgcagcaaaggtcaccgcgtgttgctcggcaattgccacgtcgaagtagcgatccgggaatttacgactaaactcgaccatgccggaaccttcacgcatcgccggagtaatcgccatcagcttgttgtctttcgctgccgtttcgcacaaccagtcgccaaagattttactatagctcggcaaaccgccgctacttttcggcaaacaaccgctggagggatcaaatttaggcacggcgtggaaagtgatcgggtctttttctgccggttcataaccacgaccttttttggtcatgatatgcaggaactgcgggcctttcaggtcgcgcatgttctttagcgtggtgataagccccagcacatcgtgaccgtccaccgggccgatgtagttaaagcccagctcttcaaacaacgtgccaggcactaccatgcctttaatatgttcttcggtgcgtttgagcagctctttaattggcggcacgccagagaaaacttttttcccgccttcgcgcagactagagtaaagcttaccggaaagcagctgtgccagatggttgttgagcgcgccgacattttcggaaatgctcatttcattgtcgttgagaatcaccagcatatcaggacggatatcgcccgcgtgattcatcgcttcaaacgccatgcctgcggtaatcgcgccatcgccaatgacacagacggtgcggcgatttttgccttctttttcggcagcaaccgcaataccaattccggcactgatggaggtactactatgcccgacgcttaatacgtcatattcgctttcgccgcgccacgggaacgggtgcagaccgcctttctgacggatggtgccgattttgtcgcggcgtccggtcaaaattttatgcggataagcctgatgccccacatcccaaatcaattggtcaaacggggtgttgtagacatagtgcagcgccacggtcagttcgaccgtgcccagcccggaggcgaagtgcccgctggaacggctcacgctgtcgagtaaatagcggcgcagttcgtcgcagagtttcggtaaactctctttcggcaacagtcgtaactcctgggtggagtcgaccagtgccagggtcgggtatttggcaatatcaaaactcatcaggggcctattaatacttattgtttatttattacgctggatgatgtagtccgctagcgcttccagtgcgctggtatcgagactctgttcagccagttgtttcaggctctgacgggcatcgtcgatcagatcccgggctttcttccgggcttgctcaagacccagaagtgcagggtaggtacttttaccaagttgctggtcggcaccctggcgttttcccaacgttgcagtatctcccaccacatccaggatgtcatcctgaacctggaaggcaaggccgatgctctctgcatacttgtcgagtaccggcagagcacgacgtcctttatctccggcgcttaatgcaccaaggcgaacggcggcgcgaatcaatgcgccggttttatgacgatgaatacgctcaagcgcgtccagaggtacgtgtttgccttccgcgtctaaatctaatgcctgaccaccgcacattccggcaataccactggcgctcgccagttcagaaatcatgctaattctgtcgcggtcgctcacttccggcatatcggcatcgcttaaaatgctgaacgccagcgtttgtaaagcgtcgccagcgagaatcgcgtttgcttcgccaaacttcacatggcaggttggcaaaccgcgacgcagatcgtcatcatccattgccggtaaatcatcatgaattaaactgtaagcgtggatacactcaacggcggcagcgggtgcgtccagcgtgtttgtgctaacgccgaacatatgaccggcggcataaaccaggaaaggtcgcaggcgcttaccacctaataatgcgccatactgcatggtttcgaccacgggagtgttctgaaagggcagtggggcgataaaacggctcagcgcctggttggcctgcttaacgcaggcttcgagttgctgcggaaagtccattactcattgtccggtgtaaaaggggttagagaggcgtcttcattgtcagacagcagaatttgtacgcgctgttcggcttgttgtaatttggcctgcccctgacgtgccagctgcacgccgcgttcgaactcgttcagcgcctcttccagcggcaggtcgccactttccagacgggttacaatctgttccagctcgctcagcgccttttcaaagctggcgggcgcctcatttttcttcggcataatgaatgtctgactctcaatatttttcgccccgtcatggtaacggactcagggcaaatagcaaataacgcgcaatggtaaggtgatgtgcacagcaaagcgatgttagtggtatacttccgcgcctggatgcagccgcaggtgtgggctgctgtatttttccctatacaagtcgcttaaggcttgccaacgaaccattgccgccatgaagtttatcattaaattgttcccggaaatcaccatcaaaagccaatctgtgcgcttgcgctttataaaaatccttaccgggaacattcgtaacgttttaaagcactatgatgagacgctcgctgtcgtccgccactgggataacatcgaagttcgcgcaaaagatgaaaaccagcgtctggctattcgcgacgctctgacccgtattccgggtatccaccatattctcgaagtcgaagacgtgccgtttaccgacatgcacgatattttcgagaaagcgttggttcagtatcgcgatcagctggaaggcaaaaccttctgcgtacgcgtgaagcgccgtggcaaacatgattttagcagcattgatgtggaacgttacgtcggcggcggtttaaatcagcatattgaatccgcgcgcgtgaagctgaccaatccggatgtgactgtccatctggaagtggaagacgatcgtctcctgctgattaaaggccgctacgaaggtattggcggtttcccgatcggcacccaggaagatgtgctgagcctcatttccggtggtttcgactccggtgtttccagttatatgttgatgcgtcgcggctgccgcgtgcattactgcttctttaacctcggcggcgcggcgcatgaaattggcgtgcgtcaggtggcgcattatctgtggaaccgctttggcagctcccaccgcgtgcgttttgtcgctattaatttcgaaccggtcgtcggggaaattctcgagaaaatcgacgacggtcagatgggcgttatcctcaaacgtatgatggtgcgtgccgcatctaaagtggctgaacgttacggcgtacaggcgctggtcaccggcgaagcgctcggccaggtgtccagccagacgctgaccaacctgcgcctgattgataacgtctccgacacgctgatcctgcgtccgctgatctcttacgacaaagagcacatcatcaacctggcccgccagattggcaccgaagactttgctcgcacgatgccggaatattgtggtgtgatctccaaaagcccgacggtgaaagcagttaaaagcaagattgaagcggaagaagagaagttcgacttcagcattctcgataaagtggttgaggaagcgaataacgttgatatccgcgaaatcgcccagcagaccgagcaggaagtggtggaagtggaaaccgtcaatggcttcggcccgaacgacgtgatcctcgatatccgttctatcgatgaacaggaagataagccactgaaagtcgaagggattgatgtggtttctctgccgttctataaactgagcaccaaatttggcgatctcgaccagaacaaaacctggctgctgtggtgtgagcgcggggtgatgagccgtctgcaggcgctctatctgcgcgagcagggctttaacaatgtgaaggtatatcgcccgtaatttgtggtttttacgtcgcatctggtcagatgcgacgtttgccgcatccgacattactcgtaataattataaatccctgccgccatcaccagttgacttgccacttcatgggctttttcacgcccaaccaacaggtcgataattttcagaccaaagtcgatagctgtacccggcccctggctggtcagcaattttacccgtgcatcccagacgacgcgcttgtccagccattgttcggcgggaattttgtctttcagcgtcgggaagccggtcatattaccaatcgggaagatatcgtgcggcaccagcacggtggctggcgcggcgcaaatagccgcgacgatacgcccggaacggtggaactgtttaacggtttcaaccagcagagtgctatcgcgaaaacactccgcgcctttaatgccaccaggcagcacgatcacgtcatattcgccatcagccacttcgaccagcggcgcatccgccagcagcttcacgccgcggctgcaggtaatcgccaggttaccatcgctggcgacgctggcagtggtgactttgataccgccgcgaaccagcagatcgatagtggtgacggcttcagtctcttcactaccaggggcgaggcaaaccagtgcgcttgcgctcatattcactctcctttctttttttaattaccaggggcgaggcaaaccagtgccgatgcgctcatattcactctcctttctttttaccatttcaaacaggcgggtgttttccggtacggcaatcccatgcgcgcgggcgcggcgtaagagaaaaccattgatatagtcgatttcagtgtggcgcagcgcgcggatatcctgcaacatgctgctgatattttccgctgtggcatcaatcacctgcatcacgtaatcacgcaaatcttctgcactagtatgatgcccttcgcgttcgatcaccgccgcgacttcttcgcatatctgcataatttcttgcggatgatgacgtaattcaccgttcgggcaattccagatggcagtcagtggattaatcacgcagttgactgccagcttgcgccacagctcggcgcgaatattgttatgccaggcaacgtcaggcaacacggtttgcaaaatatccgccagataactgtaatccccgtcctgttgccgtgccgggccaatatgcgtgataccgtttgccacatgaataatgacattgccgtcgcggcgggctgcatgggtggtggtgcccatcagtaatggctgctgaatgttttgcaactcttcgatggtgcccatgccgttgtgaattaacagtattggcgtagttacaggcagtgtggacgcgaggcttttgacggcatcggaaacctgccatgctttcagcgtcaccaggagcagatcgctggtggcgagaaaatcgggatcgttggcggtcaggctttcgttaaatatgctaccatctgtctcaaccagattcacgctacaataaggttgcggtacgcgcagccagccctgaacttcatgaccctgtttgcaaagtgctgtaagccataattgccctaaggcaccgcatcccaatacggtaattttcattgttcctcctcacccgcaaccactccgggtgttcaataaggctatcccttaattgtgcatgctgttgcgactatgcacaattaagggatacgtcctggtgcaggactgtcggttatttaactttgcgggtattatgcttcgcatcaaaaatgaagggagaggaaaagatgccatctttcgatattgtctctgaagttgatcttcaggaagcacgtaacgcggtcgataacgcgagccgcgaagtggagtcccgttttgacttccgtaacgttgaagccagttttgagctgaacgacgccagcaaaaccatcaaagtgttgagcgagtccgatttccaggtcaatcagttgctggatattctgcgtgccaagctgctgaagcgcggcattgaaggcagtagcctggatgtaccggagaatatcgttcatagcggtaaaacctggtttgtggaagcgaaactgaaacagggcattgagagcgcgacccagaagaaaatcgtcaagatgatcaaagacagcaaactgaaagtgcaggcgcaaattcagggcgatgaaatccgcgtaacgggcaaatctcgtgatgatttgcaggctgtcatggcgatggtacgtggtggcgatctcggtcagccgttccagttcaaaaacttccgcgattaatcgcgactatgtgcgttttgttcatgtcagatgcggcatgaacgcctgattcggcctacaaaggtttgtaattcagaaactttgtaggcctgataagcgtagcgcagcaggcaattcgccgcgttttttatgcctgacgaattgcctgttctatctcaaagcgattcgtcactttgctgtcgattttcacataagcactatgttcttcttctgcaatcaacacttctttgatgccttcagtttctagcaaacgcacttttaacgcctcgtttgcggcaatgttcgccgggatttcaatgcgcaaactgctgacatacggcggttctttcatggtactggcgactgtcagccacactgcggccagcattgcgccagcgagaaataccccctgaccgtcaaacatgccgttaatccagccgcccaggctaccgccaatcgccacgccaagaaactggctggtggagtaaacacccatcgccgtacctttgtaacctgctgggctctctttactgataagactgggcaggagggcttccatcaaattaaacgccacaaagaaaagctgcacgccgaccaccagttgccagaactgcgtttgcgcgttccacaacacaatttccgcaaccacgatcaacccgacgcagaagacaaagacttgcttcattttgcgcttaacttcagcgtagataatgaaaggcacgacgctgccaaaggcgattagcattgtcgccagatagaccttccagtgttcagccgccgggaaccctgcatcagccagttgtccgggcagggcaacaaacgtgctcatcagcaaaatatgcagacacataatgccaaagttgagtttcagcagccgcggttccgccagcactttactgaaactgcctttcaccattccggactcacgattaagtacgtgagtgctactgttgggcacaacccaaatggtcaacgcaatgccggtcgttgccagaatagcgatcatccagaacagcgcgtgcagcccaagtttgtgagtgatgatcgggccaagcaccatcgcaatggcaaaggtaatgccaaagctcacgccgataaacgccatcgctttggtgcggttttgttcgcgcgtgagatcggaaagcagcgccataacggcggcggcaattgctccagagccttgtagcgcccggcccagaataattccccagatggagtcggaaagcgcagcgataacgctaccggcggcaaacaccgccagcccaccgacaattaatggtttgcgaccaatgcggtcggaaagcaggccaaacggaatctgaaaaacggcctgagtcagaccataaataccaatggcaataccgattaatgcttcgctggcaccttgcagagccatgccgtacgtggtcagaaccggcagaaccataaacatgcccagcatgcgcaagctgaatacggtccctaaaccccaggtcgcgcgcctctcacctggcgtcattttataatcgttcattaccacctctgttttaaattcgcgactagtgtaaagcggcaaacgaatggggtaaacatgcggattttttagtaaatatttcgagagggatatgtttctaatgctaagaaaaaaggtgccgtagcacctttttaatagagaggttttgttaccacacagcagccagcagcgtatggctgtccggtaccataaaatcaacggacatcatcacgctgagggcagtgatggcgatgatagagaagccgaacagcttgcgcgcccagattctgtcatcagcaactttataaccgcgcagagccatacctaaccaccagacgctaaccgccgcggcgaccaccagatatttatacccagcgtaaccgccaagagagagcatcagcgtggcaacggcaaaggcgatgatatacagcgtgatgtgattcttcgccacgctaatgccttttaccactggcaataccggaatgtttgccgcctggtaatccttaaagcggaaaatggcgatggcataggagtgaggcatctgccacaggctgaagatagccagcaggatcgctgcgccgctatcgaactcaccggttaccgcacagtagccgatcaccggcggcgcagcgccggagaggctaccaatcaacgtgccgtagacagagtggcgtttcatgtacaggctataaacgccgacataaaccacaaagcccatcacccccagccagcaggccagcggattcgcgccaaaccacagcagcataaagccagcaatacccagcaacgtggcgtacaccaggctgacagcaggagagatcaggcctttcaccagcacccgattcttcgtcctttccatctttctgtcgatatccctgtcgatgtagttgttaaacacacaaccgctcgccacaaccagactcaccccaaccagcgtgtagataaacaggggataatcaatgctgcccttactggccagcaggaatcccccaatcacgctgatcaggttgccaaagatgatgcctggtttcgttacttgcaggtattgcttaaacatcataaccgccgctcttagtgcatcatcatgttgtagttgaggttccacataatccagatggagcctacaaccaggatagcgatgattagcacggtgaagacaaacgccgtcatgttccagccttcatcacttttggtattcatgtgcaggaagcacaccagatgcaccagaacctgtaccactgccattgccaggattgttcccagaattacggccggagaggcagctcctgtcatcaccatccagaacggaatcaccgtcagaatgatgctcaggataaagcctgtcatgtaggtttttacgctgccatgggacgcgccgctgtgatcggtagaatgactcattacatcgccccccatcagataaacaacagtgaacacacagatccaaaccacatccaggaagtgccagaacaggctcaggcacatgatgcgggtacggttagtgctggtcaggccgcgacgggcgatttgcaccatcagcaccgccatccagataagaccagaagtgacgtgcagaccgtgcgtgccgaccagcgcaaagaacgcactcaggaagccgctgcgatccggacccatgccgttaacaatcaggtgatggaattcatagatttccatcccgataaatccggcaccaaacaaccaggtcaacgccagccaggagataacctggcttttgttgtttttgtacatggcgatagccgccatgccgtaggtgatggagctgaacaacagcaagaaagtttcaaccagaacgaacggcagttcgaaaatgtccttacctgtcgggccgcctgcggtgccgttcaccagaacggcataggtagcaaacaagatagagaacagaatgcagtcgctcatcaggtagatccaaaatccgaagattttggttccgcctgcatcgtggtgcccgtgttcgtgcgcgtgggcagtcgcgtgcgtcaaagtatcagttgccatttttcagccctgccttagtaatctcatcgaaatgctggttttccagtttttcgatttctgccaccggcacgtagtaatccacgtcctcgtcgaagcttttcacgatccaggtgatgatcatgcctgcgaagccaacaatcgccagccaccagatatgccagatcatggcgaaaccgaagatggtggagaaagctgcaatgacgatacctgcaccgctgtttttcggcatatgaatttcttcatagtggtcaggctttttatacgcttcgcctttctctttcatttcccagaatgcatcacgttcgtgaacgtgcggcactacggcaaagttatagaacggaggcggggaagaggttgcccactccagcgtacggccaccccacgggtcgccagtcaggtcacggttctggtcgcggtcgcgaatagaaacgtacatctgaataacgaggcagagaatacccagcgcaatcagtactgcaccgctggctgcaatcatcagcatggtgtggaactgcgggtcaatctgctggctcaaacgacgggtcatgcccatgaagcccagcgcatacagtggcataaaggcaacgaagaagccgatgatccagaaccagaacgcgcgtttaccccaggtttcgttcagtttgaaaccgaacgctttaggccaccagtaggtcatccctgcgaagcagccgaagaccacgccgccgatgatcacgttatggaagtgcgcaatcaggaacaggctgttatgcagaacgaagtccgcgcccggtacggccagcagcacgccagtcatcccgcccacgctgaaggtgacgataaaaccgatggtccacagcatcgcagaatggaacacgatgcggccctgatacatggtgaacagccagttgaagatcttcaccccggtcgggatggcgataatcattgtggtgataccaaagaaggcgtttacgttcgcgcccgcacccatcgtaaagaagtggtgcagccaaacgatgaagctcagcacggtgatacagacggttgcccataccaggctggtataaccaaacagacgtttacggctgaaggttgccgcaatttcggagaacacaccgaaaacaggcaggatcaggatgtaaacttccgggtggccccaggcccaaatcaggttgatgtacatcatcatgttgccacccatatcgttggtaaagaaatgggtgcccagatagcgatccagggtcaacaacgcgacggtaaccgtcagaattgggaaggaagcaataatcagtacgttcgcgcacagacttgcccaggtaaatactggcatcttgaacatggtcatgcccggtgcgcgcatcttcagaatggtaacgaagaagttgataccggtaagcgtcgtacctataccggatagctggagactccatatccagtaatcgacaccgactcccggactgtactctattccgcttagcggtggataggccagccagccggtctgcgcaaattcgcccacgccgagagaaacgttaaccagaatcacaccaacaacggtaaaccagaagcttaagttgttgaggaacgggaacgcaacgtcacgcgcgccgatctgcagcggaaccaccaggttcatcagaccgataacgaaaggcatcgccacgaagaagatcataatcacgccgtgcgcggtaaagatctgatcgtagtggtgaggtggcaggaagcccgcttcgcccgcgctggcaagagcctgctggctacgcatcataatggcgtcagcaaaaccacgcagcaacatcacaatcgccacgatgatatacatgataccgaggcgtttatggtcgacggaggtcagccactctttccacaggtaggtccacttaccgaagtaagtgatcaggccaacgagcgccagacctcccaaaataatgccagcgatcgtaaccatgacgataggttcatggaacgggactgcatcaagacttaattttccgaacatctttattcttcctcaacccctttaatgggcggattccgcgtggctcatgtccatgccttccataccttcgtgtgcgctgtgctcaccttctggctgggtcatgtccatgctcttaccgtgagccataaacttgttaattacatcggcaaacaagtctggtttcacgttggagaaatattccacctggttgtattcgctaggcgcggccagtttttcgaacgcagccatgtcagacatggtgttcgggctctgcttcgcttttgcgacccactggtcgaatgcggcgcgatccggtgttgcaatagctttgaacttcatgccactgaagcccgggccgctgtagctggcggagataccgtcataagtgccgggttcgttggcgatcagatgcaggcgagtctgcataccggccatggcataaatctggctacccagacgcggaatgaagaaggagttcatcacggagttggaggtcactttgaagtacaccggagtgttcgccgggaaagcgatttcattcacggtagcaatgccctgttccgggtagatgaagaaccatttccagtccatggaaaccacttcgatggtaatgggcttctcgtcgtgtgccagcggcttgctaggctcaagagcgtgagtggttttccaggtcagtactgcaaggaagatgatgattaagataggtaccgtccagaccacagcttccactttattggagtgactccagttcgggctgtacttagcatctttattgctcgcacggtacttccaggcgaaaccaacagccatcaagattgcgggaataacgacaatcaacatcaggccaaatgccgtcagtatcagactacgttgctccagaccaatctgtcctttgggatctaacagcgcagaattacagccactgagcaatacagtgcctgcaaataaactcaaccatcccaaacttttattgtatttcctgagtctcatttaacgacctcaattccacgggatctggtggcgtttaaagtgtgtgggcattttacgggaaggttacattactgtaaacatgattaaattcctgttacttggatttggctgccaggtcacatatgttgcaaaacatatcaggttgattttaagaagctgttgcaaaagggcgttataacaaaaggggagtgctgaaggagtctgggcgggcaattggtataaccaatgtgaaataaaacaattatttaacaaataattatcattagagtgacaactgggtgatgagaaaataaagactcattagctgaatcgtgtaagaaaaatagaatttataaatggcgccaataatttccaaacgctaagccgcacaaaagaacaaatattaataagcgatactgatgtttatttagccgtaataattacggcgagtgattactacagctaaataatatttacagattacgtcagatgcgtttttcgtagcgccagataatccagcaaaccaccaagcacgacgccagaaagggcgactaaaaccccgacttccagcagagcaggcaggaaagagaagtgcgtcaaatccagcgcgtccatcgtcaatagcagtaaccacacggccaacaggctgacgcccgccgccagtgtccacatggcaaaggcataacctgccggatatgcggtacgggagataaagttgtcatttactcgtgtatattcaagcgtctggcggcaaaccagcagcaaaataagccctggtacggcagcggcgacggagaatagatagaatgtgctccagccgtgtgcttcaacaaaccaacccgccacggggccgacataaactcgccctacagcagaaagcgcactgagcagggcaaattgagtagcggaaaaactcttattacatagcgtcattaacagcgcgacaaaggcacttgtgcccatcccgccacagaggttttcgaaaaagacggctgcgcccatgctgtagagatgcttatcagtaatgctcagcagccagtaaccggcgttagacgcaccttgtaaaatgccgaaaatcagcagtgcccggaacagactcaggcgctgcatcaaaatcccaccgtacaatgcgccaacaatggtcgctagtaagccaagcgttttgttaaccacgcctacttcacccgcatcaaacccgacgccgcgaatcaaaaacgtggttgtcaggctcatggcgaatgcgtcgcccagcttatacagcacgataagaagcaaaataagccaggcattattgcgaccaaagaaatctcgcagaggtgcaacaaccgcttgttccagcgttttgggcacaggaatggtgtcggttggttctggtgcaagcaacgtcgcgataatacaggggatcaacagtgccgccattaaccagtacatgccctgccagcccagccatttatctgccagccacagggctaggccgccggaaaccagcatccctaaacggtaacccagcacgctgattgccgcgcccgcaccacgttcttctgccggaagcacatcggttttccacgcatcgaagactatatcctgggaagcagagcaaaaagcgatcaccactgccagcgccgccatccagcggagttgggtgcctggttcgagaaaacccatcgccgcaatggcgactaataacaggatttgcgtggcgagcagccaaccgcgccgccgcccaaaaaatggaggcgtgtagcggtccatcagcggactccagaggaatttaaaaacgtaagcctggcctaccagagagaagaaaccaatggttttgagatcgatattctcgaccgtcatccaggcctgtaaggtaccggatgtcagggcgagcggtagcccggaagcaaaacccaggatcagcaatatggcactacgcggctgttgaaaaatacgtaaatattgactggacatgggcgtctacaggcccggcttgcaccgggccagagggcagaaattaacgcgcgttctgcttgatgaattcgtggatgctggtgtcctgagacatatcagcgatggtatcggtcagcacactgttaaccgcatcggcgatatttttgttggaggcctggaacgcaccttcaacgttgtagctggcacgatagtttttggtcattttgttgccattctgcgcggtagcgatgatggcgatatccgctttggtcgcgatgttgtagcgcacgttgccctgggacacgtcagcatacagttggctaacgatgatttgcagattaaccgggccattcggaccaaccatgtaaccacgcgcggtcatctgtttttccagcacttcttgcagcaggaaacgcagatcgcgggaggcggtcagggtaacgatttgattatcgcgggtgacttttgccagcgcctgatcggtacgctgatcggcaccattaatgcttacggtgacgcccatcaggcttggatcctgctgtggcagtgtaatcgtcggggaaacttcaatagttgttggcggttttgcgcatcctgcaagcataaacagagcaactaacgggaagaggatttttttgaacatgttcgggctctcagagactcttaagcgtgtttggtaaaaattcccgccatcataacattgccaacggcgaggggaagtgggtaaggcatgtaaattcatcatgttgacgaaataatcgcccctggtaaaagaaacactgatgcgaggcctgtgtttcaatctttaaatcagtaaacttcatacgcttgacggaaaaaccaggacgaaacctaaatatttgttgttaagctgcaatggaaacggtaaaagcggctagtatttaaagggatggatgacatctcagcgttgtcggaggagatatttcatgatgatacgtgagcggatagaagaaaaattaagggcggcgttccaacccgtattcctcgaagtagtggatgaaagctatcgtcacaatgtcccagccggctctgaaagccattttaaagttgtgctggtcagcgatcgttttacgggtgaacgttttctgaatcgtcatcgaatgatttacagtactttagcggaggaactctctactaccgttcatgcgctggctctgcatacttacactattaaggagtgggaagggttgcaggacaccgtctttgcctctcctccctgtcgtggagcaggaagcatcgcgtaaaaacgcatttgcaactgtcggcgcttttccagtatgttgctaaagattttatgaaaaacggcctgcgggccgttttgttttgtctggattttgcgctttttgcccagcattcagacgaaaattgcccgggaattgtgaaaaaatacgcgacagcgcgcaataaccgttctcgactcataaaagtgatgccgctataatgccgcgtcctatttgaatgctttcgggatgattctggtaacagggaatgtgattgattataagaacatcccggttccgcgaagccaacaacctgtgcttgcggggtaagagttgaccgagcactgtgattttttgaggtaacaagatgcaagttagtgttgaaaccactcaaggccttggccgccgtgtaacgattactatcgctgctgacagcatcgagaccgctgttaaaagcgagctggtcaacgttgcgaaaaaagtacgtattgacggcttccgcaaaggcaaagtgccaatgaatatcgttgctcagcgttatggcgcgtctgtacgccaggacgttctgggtgacctgatgagccgtaacttcattgacgccatcattaaagaaaaaatcaatccggctggcgcaccgacttatgttccgggcgaatacaagctgggtgaagacttcacttactctgtagagtttgaagtttatccggaagttgaactgcagggtctggaagcgatcgaagttgaaaaaccgatcgttgaagtgaccgacgctgacgttgacggcatgctggatactctgcgtaaacagcaggcgacctggaaagaaaaagacggcgctgttgaagcagaagaccgcgtaaccatcgacttcaccggttctgtagacggcgaagagttcgaaggcggtaaagcgtctgatttcgtactggcgatgggccagggtcgtatgatcccgggctttgaagacggtatcaaaggccacaaagctggcgaagagttcaccatcgacgtgaccttcccggaagaataccacgcagaaaacctgaaaggtaaagcagcgaaattcgctatcaacctgaagaaagttgaagagcgtgaactgccggaactgactgcagaattcatcaaacgtttcggcgttgaagatggttccgtagaaggtctgcgcgctgaagtgcgtaaaaacatggagcgcgagctgaagagcgccatccgtaaccgcgttaagtctcaggcgatcgaaggtctggtaaaagctaacgacatcgacgtaccggctgcgctgatcgacagcgaaatcgacgttctgcgtcgccaggctgcacagcgtttcggtggcaacgaaaaacaagctctggaactgccgcgcgaactgttcgaagaacaggctaaacgccgcgtagttgttggcctgctgctgggcgaagttatccgcaccaacgagctgaaagctgacgaagagcgcgtgaaaggcctgatcgaagagatggcttctgcgtacgaagatccgaaagaagttatcgagttctacagcaaaaacaaagaactgatggacaacatgcgcaatgttgccctggaagaacaggctgttgaagctgtactggcgaaagcgaaagtgactgaaaaagaaaccactttcaacgagctgatgaaccagcaggcgtaatttacgcagcataacgcgctaaattcgcacaaaggcccgtcaccgccaggtggtgggcttttttttgtcatgaattttgcatggaaccgtgcgaaaagcctctttcggtgttagcgtaacaacaaaagattgttatgcttgaaatatggtgatgccgtacccataacacagggactagctgataatccgtccataaggttacaatcggtacagcaggttttttcaattttatccaggagacggaaatgagttacagcggcgaacgagataactttgcaccccatatggcgctggtgccgatggtcattgaacagaccagtcgcggtgagcgctcttttgatatctattctcgtctacttaaggaacgcgtcatttttctgactggccaggttgaagaccacatggctaacctgattgtggcgcagatgctgttcctggaagcggaaaacccagaaaaagatatctatctgtacattaactccccaggcggggtgatcactgccgggatgtctatctatgacaccatgcagtttatcaagcctgatgtcagcaccatctgtatgggccaggcggccagcatgggcgctttcttgctgaccgcaggggcaaaaggtaaacgtttttgcctgccgaatagccgcgtgatgattcaccaaccgttgggcggctaccagggccaggcgaccgatatcgaaattcatgcccgtgaaattctgaaagttaaagggcgcatgaatgaacttatggcgcttcatacgggtcaaagtttagaacagattgaacgtgataccgagcgcgatcgcttcctttccgcccctgaagcggtggaatacggtctggtcgatagcattctgacccatcgtaattgatgccagaggcgcaactgtgccgctatacttatccagggcggcacaacgctgtaagcggcttgcgcctgagaatggcatttgcgtcgtcgtgtgcggcacaaagaacaaagaagaggttttgacccatgacagataaacgcaaagatggcagtggcaaattgctgtattgctctttttgcggcaaaagccagcatgaagtgcgcaagctgattgccggtccatccgtgtatatctgcgacgaatgtgttgatttatgtaacgacatcattcgcgaagagattaaagaagttgcaccgcatcgtgaacgcagtgcgctaccgacgccgcatgaaattcgcaaccacctggacgattacgttatcggccaggaacaggcgaaaaaagtgctggcggtcgcggtatacaaccattacaaacgtctgcgcaacggcgataccagcaatggcgtcgagttgggcaaaagtaacattctgctgatcggtccgaccggttccggtaaaacgctgctggctgaaacgctggcgcgcctgctggatgttccgttcaccatggccgacgcgactacactgaccgaagccggttatgtgggtgaagacgttgaaaacatcattcagaagctgttgcagaaatgcgactacgatgtccagaaagcacagcgtggtattgtctacatcgatgaaatcgacaagatttctcgtaagagtgacaacccgtccattacccgagacgtttccggtgaaggcgtacagcaggcactgttgaaactgatcgaaggtacggtagctgctgttccaccgcaaggtgggcgtaaacatccgcagcaggaattcttgcaggttgatacctctaagatcctgtttatttgtggcggtgcgtttgccggtctggataaagtgatttcccaccgtgtagaaaccggctccggcattggttttggcgcgacggtaaaagcgaagtccgacaaagcaagcgaaggcgagctgctggcgcaggttgaaccggaagatctgatcaagtttggtcttatccctgagtttattggtcgtctgccggttgtcgcaacgttgaatgaactgagcgaagaagctctgattcagatcctcaaagagccgaaaaacgccctgaccaagcagtatcaggcgctgtttaatctggaaggcgtggatctggaattccgtgacgaggcgctggatgctatcgctaagaaagcgatggcgcgtaaaaccggtgcccgtggcctgcgttccatcgtagaagccgcactgctcgataccatgtacgatctgccgtccatggaagacgtcgaaaaagtggttatcgacgagagcgtaattgatggtcaaagcaaaccgttgctgatttatggcaagccggaagcgcaacaggcatctggtgaataattaaccattcccatacaattagttaaccaaaaaggggggattttatctcccctttaatttttcctctattctcggcgttgaatgtgggggaaacatccccatatactgacgtacatgttaatagatggcgtgaagcacagtcgtgtcatctgattacctggcggaaattaaactaagagagagctctatgaatcctgagcgttctgaacgcattgaaatccccgtattgccgctgcgcgatgtggtggtttatccgcacatggtcatccccttatttgtcgggcgggaaaaatctatccgttgtctggaagcggcgatggaccatgataaaaaaattatgctggtcgcgcagaaagaagctagtacggatgagccgggtgtaaacgatcttttcaccgtcgggaccgtggcctctatattgcagatgctgaaactgcctgacggcaccgtcaaagtgctggtcgaggggttacagcgcgcgcgtatttctgcgctctctgacaatggcgaacacttttctgcgaaggcggagtatctggagagcccgaccattgatgagcgggaacaggaagtgctggtgcgtactgcaatcagccagttcgaaggctacatcaagctgaacaaaaaaatcccaccagaagtgctgacgagcctgaatagcatcgacgatccggcgcgtctggcggataccattgctgcacatatgccgctgaaactggctgacaaacagtctgttctggagatgtccgacgttaacgaacgtctggaatatctgatggcaatgatggaaagcgaaatcgatctgctgcaggttgagaaacgcattcgcaaccgcgttaaaaagcagatggagaaatcccagcgtgagtactatctgaacgagcaaatgaaagctattcagaaagaactcggtgaaatggacgacgcgccggacgaaaacgaagccctgaagcgcaaaatcgacgcggcgaagatgccgaaagaggcaaaagagaaagcggaagcagagttgcagaagctgaaaatgatgtctccgatgagcgcagaagcgaccgtagtgcgtggttatatcgactggatggtacaggtgccgtggaatgcgcgtagcaaggtcaaaaaagacctgcgtcaggcgcaggaaatccttgataccgaccattatggtctggagcgcgtgaaagatcgaatccttgagtatcttgcggttcaaagccgtgtcaacaaaatcaagggaccgatcctctgcctggtagggccgccgggggtaggtaaaacctctcttggtcagtccattgccaaagccaccgggcgtaaatatgtccgtatggcgctgggcggcgtgcgtgatgaagcggaaatccgtggtcaccgccgtacttacatcggttctatgccgggtaaactgatccagaaaatggcgaaagtgggcgtgaaaaacccgctgttcctgctcgatgagatcgacaaaatgtcttctgacatgcgtggcgatccggcctctgcactgcttgaagtgctggaaccagagcagaacgtagcgttcagcgaccactacctggaagtggattacgatctcagcgacgtgatgtttgtcgcgacgagcaactccatgaacattccggcaccgctgctggatcgtatggaagtgattcgcctctccggttataccgaagatgaaaaactgaacatcgccaaacgtcacctgctgccgaagcagattgaacgtaatgcactgaaaaaaggtgagctgaccgtcgacgatagcgccattatcggcattattcgttactacacccgtgaggcgggcgtgcgtggtctggagcgtgaaatctccaaactgtgtcgcaaagcggttaagcagttactgctcgataagagtttaaaacatatcgaaattaacggcgataacctgcatgactatctcggtgttcagcgtttcgactatggtcgcgcggataacgaaaaccgtgtcggtcaggtaaccggtctggcgtggacggaagtgggcggtgacttgctgaccattgaaaccgcatgtgttccgggtaaaggcaaactgacctataccggtagcctcggcgaagtgatgcaggagtccattcaggcggcgttaacggtggttcgtgcgcgtgcggaaaaactggggatcaaccctgatttttacgaaaaacgtgacatccacgtccacgtaccggaaggtgcgacgccgaaagatggtccgagtgccggtattgctatgtgcaccgcgctggtttcttgcctgaccggtaacccggttcgtgccgatgtggcaatgaccggtgagatcactctgcgtggtcaggtactgccgatcggtggtttgaaagaaaaactcctggcagcgcatcgcggcgggattaaaacagtgctaattccgttcgaaaataaacgcgatctggaagagattcctgacaacgtaattgccgatctggacattcatcctgtgaagcgcattgaggaagttctgactctggcgctgcaaaatgaaccgtctggtatgcaggttgtgactgcaaaataatgacctcgcgcaaaatgcactaataaaaacagggctggcaggctaattcgggcttgccagcctttttttgtctcgctaagttagatggcggatcgggcttgcccttattaaggggtgttgtaaggggatggctggcctgatataactgctgcgcgttcgtaccttgaaggattcaagtgcgatataaattataaagaggaagagaagagtgaataaatctcaattgatcgacaagattgctgcaggggctgatatctctaaagctgcggctggccgtgcgttagatgctattattgcttccgtaactgaatctctgaaagaaggggatgatgtagcactggtaggttttggtacttttgccgttaaagagcgtgctgcccgtactggccgcaacccgcagaccggtaaagagatcaccatcgctgctgctaaagtaccgagcttccgtgcaggtaaagcactgaaagacgcggtaaactaagcgttgtccccagtggggatgtgacgaagttcaagggcgcatctactgatgtgccttttttatttgtattcggtgactttctgcgtcttgtgggctgacaattgcccccgtttcttgtcacaataggcctttgcgcgcatcgatacgttgcgtgaggtacacagtcatctacagcggagtgttgttacaccatgatggacagcttacgcacggctgcaaacagtctcgtgctcaagattattttcggtatcattatcgtgagcttcatattgaccggcgtgagtggttacctgattggcggaggcaataactacgccgcaaaagtgaatgaccaggaaatcagccgtgggcaattcgagaacgccttcaacagcgagcgtaatcgcatgcagcaacagctgggcgatcaatactccgagctggcagcgaacgaaggctatatgaaaaccctgcgtcaacaggtgctgaatcgtctgatcgacgaggcgctgctggatcagtacgcacgtgagctgaaactgggtatcagcgatgagcaggttaaacaggcgattttcgcgaccccagccttccaggttgacggcaaatttgataacagccgctataacggtatcctcaaccagatggggatgaccgccgatcagtacgcccaggcgctgcgtaaccagctcactacccaacagctgattaacggcgttgccggtaccgattttatgctgaaaggtgaaaccgacgagctggcggcactggtcgcgcaacaacgcgtggtgcgtgaggcgactatcgatgttaacgcgctggcggcgaagcagcctgtgaccgaacaggagattgccagctactacgaacaaaacaaaaacaatttcatgacgccggaacaattccgcgtgagttacatcaagctggatgccgcaacgatgcagcaaccggttagcgatgcggatatccagagctactacgaccagcatcaggatcaattcacccagccgcagcgtacccgctacagcatcatccagaccaaaactgaagatgaagcgaaagcggtacttgatgagctgaataaaggcggtgattttgctgcattagccaaagaaaaatctgccgatattatctctgctcgtaacggcggcgatatgggttggttagaagatgccactatcccggacgaactgaaaaatgctggtctgaaagaaaaaggccaactgtctggtgtcatcaaatctagcgtcggtttcctgattgtacgtctggacgacattcagccagcgaaagtgaaaagcttagacgaagtacgtgacgacattgcggcgaaagtgaaacacgaaaaagccctcgatgcgtactacgcgctgcagcagaaagtgagcgatgcggcaagcaacgacaccgagtctctggccggtgcagagcaagctgccggcgttaaagccactcagacgggttggttcagcaaagataacctgccggaagagttgaacttcaagccggttgccgacgctatctttaacggcggtctggtaggtgaaaacggcgcgccgggcatcaactctgacatcatcaccgtagacggcgaccgcgcattcgtgctgcgcatcagcgagcacaaaccggaagcggtgaaaccgttggcagatgttcaggaacaagttaaggcattggttcagcacaacaaagctgaacaacaggcgaaagtggatgctgagaaactgctggttgatttgaaagccggcaaaggtgcggaagctatgcaggctgccggtctgaaatttggcgagccgaaaaccttaagccgttccggtcgtgacccgattagccaggcggcgtttgcactgccactgccagcgaaagacaaaccgagctacggtatggcgaccgatatgcaaggtaatgtggttctgctggcgctggatgaagtgaaacaaggtagtatgccggaagatcagaaaaaagcgatggtgcagggtatcacccagaacaacgcacaaatcgtctttgaagctctgatgagtaacctgcgtaaagaggcgaaaatcaaaattggcgatgcgctggaacagcaataatcctgaagccgcctcgcaaaaaaatgcgttgcagctgtaacaagaaaaggtcgctttcgcggccttttccatttctgaacattgccatttgtttactgttttcactgccgttaaggtgattccactgttaacaaacaaggagaaaacagtatgaaacacggaattaaagcactgctcattaccctgcccctggcctgtgccggaatgtctcatagcgcgctggcggcagcttctgtggcgaaaccgacggcggtagaaaccaaagcggaagctcctgcagcacaaagtaaagcagcagtaccggcgaaagccagtgacgaagaaggcacccgggtcagcattaataatgccagcgcggaagagctagcccgcgcgatgaatggcgttggcctgaagaaagcgcaggcgattgtcagttatcgcgaagagtacggtccgtttaaaactgtggaggatctaaagcaggtgccggggatgggcaatagcctggtggaacgtaatctggcggtattaaccctgtaattaatttgcatagtggcaattttttgccagactgaagaggtcataccagttatgacctctgtacttataacaacaacgtaaggttattgcgctatgcaaacacaaatcaaagttcgtggatatcatctcgacgtttaccagcacgtcaacaacgcccgctaccttgaatttctcgaagaagcccgctgggatgggttggaaaatagcgacagttttcagtggatgacggcccataacatcgccttcgtcgtggtcaatatcaatattaactatcgtcgcccagcggtattaagtgacctgttaactattaccagtcagttgcagcaattaaacggtaaaagcggcatcttaagccaggtcattacactggagccggaagggcaggtggtagcggatgcgcttattacgtttgtttgtattgatcttaaaacgcagaaagcattagctctggaaggggaattgcgcgaaaagctggagcagatggttaagtaaacgttttgtggtgccggatgctcaagccgcatccggcgacacccggaataattacctcaacccggttttctgcttcatcgctgccatcaccgtcggtttatcggccagataatgattcaaaccgttggcgcgtaaattacatgccgcacaatgaccgcaaccgtcgcctttaaagccgttatagcaggtcaacgtttcgttacggactaaatccagtttgccgtaataatctgccagcgcccaggtttccgctttatcaatccacatcagcggcgtttcaaaacgaatatctttcgccatgcccaaactgacggcatggtttagtgctttcacaaactcatcgcggcaatccgggtagccggagaaatccgtttcgcagacgccagtaattacggcttctgcttttacctgatacgcatatattgccgccagcgtcaggaacaaaatattacgccctgggacaaacgtattcgggataccatcggcttcaggttcataatcaggcaccggaatgctgtcacgcgtcaggctactgaccgccagctcgttgagcagggtgacatccagcaccttatgcgcgcgtgcccccagtttcagcgccagttcgcgtgccacgtcgatttctgcgcgatgccgctgaccgtaatcgaacgtcacgcaatggacttcatcatattgttgtaatgcctgcaccagacaggtggtggaatcctgacctccactgaacacaacgacagcacgtttcatagataatcctgcttgaacaataaaagcgttatggtaacgcctgcgattaacccggaccagctattcattggcttggcgcgggaagccaggcttcggtaaattcaaaccagccgcgcggtgtcagtcgcacaccgttcacgccgggaggggcactaatgcgatagtgatagttgaacagcggcgtcagcgtcgcatctgtcattaactggctaaaaaccgctttcagggcattaaatcggttttcttcatcaggcattatttgcacggcatccagtgtgctttgtagatgtgcgtatgctggagcgtcgaaaacatgtggccacagcggatcgcagcgcagccattgctccagagtatattccggtgcttcgccaattaatctgtcgcccatcatgaggtctgcgtgtgcctgtagggtcgtgtcgtcccagttttttgcgttatgaaaaataattgtgagttcacagccttccgctgccagtgtcgcctgtaggcgttctgccatggtatgaagttctatcggtaggtgataaaccagcgtcaaggttttcggtagtttgacttcatccggtacctgccaatgcggaatagtccagcctggcagtaatgcatgactggcggtgatcaggttttctccgacttctaacgtttgtaataaaccggattgatgaataatggagatcacttttcgcgcctgccagagggagagtcggggacttttgcgcaacgtcaaatagcaaaaacctaaactgatgccgctactgacctggctgacccgttgcagctcctccggtttgccgatggtgatttgcacgggatgccgacaactggttcccaaatctttttcgaaaagcggcggagttatccagtactcaaccgctttaagcagcggatgacgtaaatggtaataatcatggctttccaggcgcaccagctctgctgtgaattgtgttaagcgaaaaggacccgtgccgatcagtgggaattgcggatgcgccagatggctgcaatagctcgccagccggtgcgcaagccagtaatcagggcgatgtaaaaagaaggtcagacactgcggatgggtgacttcaatacgcttcacgctaataaataattgatccagtgctggcagttgtaacagcatcaataatcgctggtgtaagtgactggcttttactgcatcgccgttatgccagtgtagggtactacgaagataaaagtcccagcgtaacccgtcagtagaggtttcccagtgatgcgctaaatcgccaatcgggcgctgagtattattatcgaagcgggtcaggccggaaaatatctgcccggcgagatgctgctcggcacggccgggcaaaaagcctggttgtagcggttcgagcgggcgatagtagggaatacgcaacgtgggtgtatcgttttgccattgtccgcccataaacggctgtaacagagtgcgcagctcacctggggccagttgcgccagctccagcacatcttgctgctttccggtttccagtgcctgttccatcatcgcattgcgtaggctttccggcgtgaccagaaagcgtaattgtccgcgctttccgcgtccactctgcgcctgccactccagccatcccgcctcctgtgcctgacgcaacagcgtacgaacatggcgttcgctgcaaaaacagcgttcggccagttcgctgacggtgacggtttgcggctttccggcggaaggttgccacagacgttgatactggttaagacggttgagcaatcgcatataaacccggaacaatattatttaactattcactattacttccgtatatatcaggtgatactcaatcaccattaaccgtgtcacagagtggagaaagaaatggctcgtctggcagcatttgatatggatggcactttattgatgcccgaccatcatttaggtgagaaaaccctctctactttggcgcgactgcgtgaacgcgacattaccctcacttttgccacggggcgtcatgcgctggagatgcagcatattctcggggcgctaagcctggatgcgtatttgattaccggcaacggaacgcgcgtgcattctctggaaggtgaacttttacatcgtgatgatttacctgcggatgtcgcggagctggtgctgtatcagcaatgggatacccgagccagcatgcatatcttcaatgacgacggttggtttaccgggaaagagatccctgcgttgttgcaggcatttgtctatagcggttttcgttatcagataatcgatgtcaaaaaaatgccactcggcagcgtcaccaagatctgcttctgtggcgatcacgacgatcttacacgcttgcagatccagctatacgaagcattaggcgagcgtgcacatttgtgtttttccgccacggattgcctcgaagtgctgccggtgggctgcaataaaggcgctgcattgacggtgctgacccaacatttaggtttaagcttgcgcgattgcatggcctttggtgatgcgatgaacgatcgcgaaatgttagtcagcgtcggtagcggatttattatgggcaatgcgatgccgcaactgcgcgcggagctcccgcatttaccggtgattggacattgccgaaatcaggctgtctctcactatttgacgcactggctggactatccacatctaccttattcccccgaataacgagatcccttccagcaccgggcaattgcccggttttttttgcgttgaatttgtcattttgtgccgtggtgtttaaaccgcacagaataaattgtcgtgatttcacctttaaaataaaattaaaagagaaaaaaattctctgtggaagggctatgttagataaaattgaccgtaagctgctggccttactgcagcaggattgcaccctctctttgcaggcactggctgaagccgttaatctgacaaccaccccttgctggaagcgcctgaaacggctggaggacgacggtatccttatcggcaaagtcgccctgctggatccggaaaaaataggcctcggcctgaccgcttttgtgctgataaaaacgcaacatcacagcagcgaatggtattgccgctttgtcacggtggttaccgaaatgccagaagtgctggggttctggcgcatggctggtgaatacgattatctgatgcgcgtccaggttgccgacatgaaacgctacgacgagttttataagcgtctggtaaacagcgtgccggggctgagcgacgtcacttccagcttcgcgatggaacagattaaatacaccacttctttacccatcgaataaatatccagaatcaggtcaggacacaacgcgtgcgattatttgctcaattaagctggtatttccgtcgggaatggcgtcgctatctcggggctgtcgccttgcttgtcattatcgcgatgctgcaactggttccgccaaaagtggttggtattgttgtcgatggcgtgacagaacaacactttactaccgggcagatcctgatgtggatcgccaccatggtgctgattgccgttgtggtttatctcctgcgttacgtctggcgggtattgctgtttggtgcgtcttatcaactggctgttgaactgcgtgaagattattaccgtcagctaagccggcagcatcctgagttttacctgcgtcatcgcaccggtgacctcatggctcgtgcgaccaatgacgtcgatcgcgtcgtgtttgccgccggagaaggggtgctgacgctggtggatagtctggtgatgggctgcgctgtgttgattatgatgtctacgcaaattagctggcagttgaccttattttccctgttgccgatgccagtgatggcgatcatgattaagcgcaacggcgatgctttgcatgaacgctttaagctggcacaggcggcgttttccagtcttaatgaccgcacccaggaaagcctcaccagtatccgcatgatcaaagcctttggtctggaagatcgccagagcgcgttatttgccgcggatgccgaagataccggcaaaaaaaacatgcgggtggcgcgtattgatgctcgtttcgacccgaccatctatatcgcgattggtatggcgaacttgctggcgattggcggcggtagttggatggtggtgcagggcagtttaacgctgggccagctcaccagttttatgatgtatttaggtctgatgatttggccaatgctggcgctggcatggatgtttaacattgtggaacgtggtagtgctgcgtacagccgtattcgcgcgatgctggcggaagcgccggtggtgaacgatggtagcgaacccgtgccggaagggcgtggcgaactggatgtaaatattcaccagttcacgtatccgcagactgaccatcctgcgctggaaaacgtcaatttcgccctgaaacccggtcagatgctgggtatctgcgggccgactggttccggcaaaagtaccctgttgagcctcattcagcgtcatttcgacgtcagcgagggggatattcgctttcatgatattcctctgacgaagttacaactcgatagctggcgtagccgcctggcggtagttagccagacgccattccttttttctgacactgtggcgaataacatcgcgctgggttgcccgaatgccacccagcaagagattgagcatgtcgcgcggttagccagcgtacatgacgatattttgcgtctaccgcaaggttacgatacagaggtgggcgagcgcggtgtgatgctttccggcgggcaaaaacagcgtatctccattgctcgtgcgttattagtcaacgcggaaatcctcatccttgatgatgcgcttagcgcggtggacggacgcactgagcaccagatcctgcataacctgcgtcagtgggggcagggaagaacggtaatcatcagtgcccatcgcctttctgcactgacggaagccagtgaaattattgtgatgcagcacggacatatcgcccagcgtggcaatcatgatgtgctggcacaacaaagcggctggtatcgcgatatgtatcgctatcaacaactggaggcggcgctcgacgacgctccggaaaatcgcgaggaggccgtcgatgcgtaactaaaaatcgcgaggaggccgtcgatgcgtagttttagccaactgtggccgactctcaagcgcctgttagcgtacggtagcccgtggcgtaaaccgctggggattgcggtcctgatgatgtgggttgcggcggcggcagaagtcagtgggccgctgcttatcagctattttatcgacaatatggtagcgaaaaataacctgccgttgaaagtggttgcagggctggctgcggcgtatgttgggctgcaactgtttgccgccgggctacattacgcgcagagcctgctgtttaatcgggcggcagtaggcgtagtgcaacagttgcgtaccgacgtgatggatgctgcgttacgccagccattaagcgagtttgatacccaacccgtcgggcaggtgatttcccgcgtcactaatgacactgaagtgatccgcgatctctacgttaccgtagtggcaactgtcctgcgcagtgccgcgctggtgggcgcgatgctggtggcgatgttcagcctcgactggcgaatggcactggtggcgataatgattttcccggtggtgctggtggtaatggtgatataccagcgttacagcacgccgattgtccgtcgtgtgcgcgcctatttggcggatatcaacgacggctttaacgaaatcatcaatggcatgagcgttatccagcagtttcgtcagcaggcgcgatttggcgaacgtatgggggaggccagtcgtagtcactatatggcgaggatgcaaaccctgcgcctcgacggttttctgctgcgtccgctgctgagtctgtttagtagcctcattctttgtggcttgttgatgctgtttggcttctccgccagcggcaccattgaagtgggcgtgctgtatgcgtttatcagctatcttgggcgacttaacgaaccattaatcgaactgaccacgcaacaggcgatgctgcaacaggctgttgttgctggtgagcgcgtgtttgaactgatggacggaccgcgccagcaatatggcaatgatgatcgcccgttacagagtggcaccatcgaagtcgataacgtgagttttgcttatcgcgatgacaatctggtgctaaagaacattaatctctctgtgcctagccgcaattttgtggcgctggtcgggcataccggcagtggcaaaagcaccctcgccagtttattgatgggctattacccgctaacggaaggtgagattcgccttgatggtcgtccattaagtagcctaagtcacagcgcgctgcgccagggcgtggcaatggtgcagcaagatccggtggtgctggcggataccttcctcgccaacgtgacgctggggcgggatatctccgaagaacgcgtctggcaggcgctggaaaccgtgcaactggcggagctggcgcgtagcatgagcgacggtatttacacgccgctgggcgagcaggggaataatctcagtgttgggcaaaagcaactgctggcactggcgcgcgtgctggtcgagacgccgcaaatcctgatccttgatgaggcaaccgccagcattgactccggtactgaacaggcgattcaacatgctctggcggcggtgcgtgaacataccacgctggtagtgattgctcaccgcttaagcaccattgttgatgccgacaccattctggtgcttcatcgtgggcaagccgtggagcagggcactcaccagcaactgctggcggcccagggacgctactggcagatgtatcaactgcaacttgcgggcgaagagctggcagccagcgtgcgtgaagaggaaagtttgagcgcctgaatagcgcaatatttcatcgttggtgcaaaaatgtaacgcactgtgcactgtcatagtgcgttttcattttcaaacttcttaacttcctgctctctttctcgtttttcatttctggcacaccgcttgcaataccttcttcgtgtagcagaaccattaccgaattctgaccggaggggatctatgaagctggtgaccgtgataatcaaaccattcaagctggaagacgttcgtgaagcgttatcttccattggtattcagggcctgaccgtcaccgaagtgaaaggtttcgggcgtcagaaagggcatgccgagctgtaccggggggcggaatacagcgtcaatttcctgccaaaagtaaaaattgatgtggcgattgctgatgaccaactcgatgaagtgatcgatatcgtcagtaaggcggcttacaccggaaaaattggcgacggcaaaatcttcgtcgctgaattgcaacgcgtcattcgtattcgtaccggcgaagccgacgaagcggcgctgtaatctctggcacacagcaacaggaacgaaaaatgaagatagcgacgataaaaactgggcttgctagtctggcgatgcttccgggactggtaatggctgcacctgcggtggccgataaagccgacaatgcgtttatgatgatttgtactgcgctggtgctgtttatgactattccggggattgccctgttttacggtgggttgattcgcggcaaaaacgtgctgagcatgctgacgcaggtgacggtgacatttgcactggtctgtattctctgggtggtttacggttacagcctggcgtttggtgagggcaacaacttcttcggcaacattaactggttgatgctgaaaaacatcgaactgacggcggtgatgggcagcatttatcagtatatccacgtggcgtttcagggaagctttgcctgcattaccgtcggcttgatagttggggcgctggcggaacgaatccgcttcagtgctgtgttgattttcgtggtggtatggctgacgctctcttacattccgattgcgcatatggtgtggggcggtggtttgctggcttctcacggtgcgctggatttcgcgggtggcaccgtggtgcacattaacgccgcaatcgccggtctggtgggcgcgtatctgataggaaaacgcgtgggcttcggtaaagaggcgtttaaaccgcacaacctgccgatggtcttcaccgggactgccattctctatatcggttggtttggctttaacgccgggagtgcgggcacggcgaatgaaatcgcggcactggcatttgtgaatactgtggtcgcaacggcggcggcaattcttggctggatcttcggtgaatgggcgctgcgtggtaagcctagtctgctgggggcgtgttctggcgcgattgccggtctggtcggcgtgacgccagcctgcggctacattggggttggcggcgcgttgattatcggcgtggtagctggtctggcgggcttgtggggcgttaccatgctcaaacgcttgctgcgggtggatgatccctgcgatgtcttcggtgtgcacggcgtttgtggcattgtcggctgtatcatgaccgggatttttgccgccagcagcctgggcggcgtgggcttcgctgaaggtgtgacgatgggccatcagttgctggtacagctggaaagcatcgccattacgatcgtctggtccggtgttgtggcatttatcggctacaaattggcggatctgacggttggtctgcgtgtaccggaagagcaggagcgagaagggctggatgtcaacagccacggcgagaatgcctataacgcgtaacaagcactgcaaaaaacagccggacggttttcacctccggctatttttttaattgtgattacgcatcaccccttcctgaacggtgctggcaaccagtacgccgtcttgggtataaaactcaccgcgcacaaagccacgtgcgctggacgcgctggtgctctccacgctatacagcagccattcattcaaattaaacgggcgatggaaccacatggaatggtcaatggtggcaatctgaatccccggttcgagaaaaccgatgccgtgcggctgtagagctaccggcaggaagttaagatcagaagcgtaaccgagcagatactgatgaacgcgcaggtcatccggcacgctaccatttgcgcggatccacacctgacgatgtggttctgcgacgtgacctttcagtgggttatgaaactccaccggacggacttccagcggacgatcgcagatgaatttatctttcagcactggcggcagcaggtgcgccaggctttgggcgatttgcgtttcgctagggaggccatcaggcgctggcgcggacggcattgttttttgatgttcgaaacccgcttctggtgcctggaaagaggcagtcatataaaaaatcggtttgccgttttgaatagcagcaacccggcgggcgctgaagctgttaccgtcacgcagcgtttcgacatcataaataatcggcttcttactatcgccagggcgaagaaagtagctgtgaaagctatgtaccagccgctcttcagggacggtctcttttgcagcatacaaggcctgacccacgacctggccgccaaacacctggcgtaaacctaaatcttcactctggccgcgaaagagtccttcctcaattttttccagatttaacaatgtcagtaaattttttagcgcctgactcatataactctccagtaacaaagctgccgcagcaagccaaagtgagttgagtataacgcaaatttgctactggtccgatgggtgcaatggtctgaattacgggctaattacaggcagaaatgcgtgatgtgtgccacacttgttgacgttactattttgttaaccactcttccggcgaggaaagttagcccgctggtgcattgataataaggagaaatgaatgaaactcgtgcacatggccagtggtttagcggttgcgattgcgttggcggcttgcgcagataaaagcgcggatattcagacgccagcaccggctgcaaatacgtctattagtgcaacacaacaaccagctatccagcaaccgaatgtctccggtaccgtctggatccgtcagaaagtcgcactgccgcctgatgctgtgctgaccgtgacactttctgacgcgagcttagccgatgcaccgagtaaagtgctggcgcagaaagcggtgcgtactgaaggtaaacagagtccattcagctttgttctgagttttaacccggcagatgttcagccgaacgcgcgtattctgttgagtgcggcgattaccgtgaatgacaaactggtatttatcaccgataccgttcagccggtgatcaaccagggcggaactaaagccgacctgacattggtgccggtacagcaaaccgccgtgccggttcaggccagcggtggcgcaacgactaccgtacctagcactagtccaactcaggtgaatccgtctagcgcagttccagctcctacgcaatattaagcgacgttaaccctctccgcccggagagggttagtagttccagcgataacgctgcaagtcgatttgcccgcttccgcttaccatcacaccttctgccagtaatgcctgtcgctgacgctgtaaatccggtccggttaggctaattgtgccgtggcgattaaccacccggtgccagggtaaggtgctgccttcagggagacgctttaacacaccgcccacctggcgcgcggcgcgggggcttcccgccagtttcgccacatcaccgtaagtggtgacatagccttcgggaatagcggcgacgatttgccagacgcgttggggaaaactatcttctttttccatcttttcttcctgaggtaatttttcagcataatctggaaaaacgccgctgtgaagtcgcattgcgcaagaaaccagcatctggcacgcgatgggttgcaattagccggggcagcagtgataatgcgcctgcgcgttggttctcaacgctctcaatgggggctctgttggttctcccgcaacgctactctgtttaccaggtcaggtccggaaggaagcagccaaggcagatgacgcgtgtgccgggatgtagctggcagggcccccacccatttctgcctcccaccgtttcgtcaaaaaatcccaacatggctaaactttaaccacaactgacgtcgcaagaattgtctggctgcgcagtacgcttcggaggtatgtctgatgaagtatgttgatggttttgtggttgccgttcctgccgataaaaaggatgcctatcgggaaatggccgctaaggctgcgccattgtttaaagagtttggcgcgcttcgtattgtcgaatgctgggccagcgatgtaccggatggcaaagtgaccgattttcgtatggcggtgaaagcggaagagaatgaagaggttgtctttagctggattgaataccctagtaaagaggtccgcgacgctgctaatcaaaagatgatgagcgacccacggatgaaagagttcggcgagtccatgccgtttgacggcaagcgaatgatctatggcggattcgagagtatcatcgacgaataagtagcgtgacgggctgtgcggcgtgccgtcagcccaaaaattcacaaatgttgctcggcccagcgtaagaaatcttctttcggtaatgccttgctgtagagccagccctgaccgtagtgcacgccatgctggcgtaaccactcttcttgtttactggtttcgattccctccgctaccattttcagtttcagtgtttttgccatttcgatgatatgcggcgtgacatttttatattccagcgcatcaacgaaagatttatcgatcttcagaatgtcgacatccagatcctgtaaataacttaaactactataccccgtaccaaaatcatcaagataaatttcatggcccgcctcccggtagcgagaaattatcggggcgctggttttcggatcggcaaactcgcgttcagtgagttcaagcgcgatctgtctgggattaacctgatagtgattgatcatgtcacgcagcaattgcgggattttttcgctggtgagcacgggggattcaagattgatgctaatatgctgctgtggatgctgacgcagccagtcgcccatatcttcaaagacgcttcttataatcagtagcgtcaatggctcagaaaggcccgtttgctgtgccagcggaataaaactatctggactcaaccaactaccgtctgtctgcggccagcgcgccagtgcctcagcaccgacaattttgccattggctaaggagacaatcggctgatagtgcacgcaaatatcacgattttcgatagcatcctgcagccgatgatgcggactctgaatacggcgcaaaatacgcagcacaaacatcgctgccagcaggccaatcaccaacccgagcggtaaccaaataaagacttgccgatgccagcctttctgcaacattttcgtactagcccatgtgatgatgctaatattcatctccggtaagggcaggatatcgtaaatgattccattattttcgatatgctcaccgggtgttttttgtagcctggtaataattccctgagcaatttcatcgctgctggttatgacaacgttatgggcattgccaataatggcggcatcaatttgccaactgctatagggaatgacatcaataaaggaagcggggtcgatcatgacgacataatgtgccgttcccatggcgaccatgtaacggataatgcctaaatcgttatggcttgttaaccagacacgataaccatctttgctaattttacctggctcggggaaggtatcgggcggactttcatgctccagagagctacactggggaacgttgttatcgatataagccacttcctgaatatagcgataactgtaagatacccgacgcatttccatgagatgggcttcgctacaggcagcgccttgccatctttccagctcctgcagcgcatctttcccttgtgtcgccaccttattggctcgaatagcgacgcgggaggaataggtatccagctcttcaataaagcttgtttctacctgctgatgggccagccagatgcttaagccgacaggcagcaatacactaagaatcagtactccgctaataaggccgaccagatgtcgtgttctcaccagcatatccttattaacacagtgtagggaaagtatatctgattgtggaaaaaggctggctggagataaggaggtagagctggtatttcatgaagtgatgggtggaaacgatcattgtcatttgaccaggcgcagagctttacgcctggtatgtaaccctaacttaagatgtactttcggcgcgagcgagggtaaaaatatcgtaaaaagacagttcacctttacggacgatcattttttgcagttgttccttatgaacatccgcgacacgcggagagttcaagatggcttcaaccagcgcggcaggtacaaagcgcgtgttgtaccattcgccgttatagcaaacgcggaaatccagcacgtcgatatcttcatagcggtagcgtgggtagacatcgaaaaagaagaaaccattaagcaggataaataatacaaccagtagccagacagagccactcagcgtttcggactgcaacatcaccgccagggtggcaaaaaaagcaacgtacataccgataaacagccccggatgtttacggataaaactgatactaaagcggggtttgttgtcgcgtttttcgcgggtattcagagactcaatcgtttcggtcagcaggcgttgtatttcggtcatcgtttgccttcgtggtatctgcaactttccagggaacaccctattttaacgtgggaatagtagaggggaagtaacagatctaccacaattttgcataacagttgcgaaaaaccgattacaattttttaattattctggctggattaccgcccacgacaacgttgtccgggacatcttttgtgacaactgcaccactggctaccacgacgttatcaccaatggtcacaccagggttaatgaccgcgcgtccgccaatccagacgttattaccgatggtgacgggtttccccagttcagcaccgctattacgtgctacagggtcgatgggatgtgttgccgtgtagatatgaacgcctggtgccaacatacagttatcaccgatgcgaatagggcagacatcaagcatcacgcaatcgaagttggcgaaaaaattattaccgagaaaaatgttatagccatagtcacagcgaaacgttggctcaatataagcctctgtcacctgaccgaatagatcagcgagaatttgctggcgtaatgtgtgctcttccgccagggaatgattgtatcggtgaataagctgacgagcgcgcaggcgatcgcgagataacgtctcatctgcgctgcgatacaactcaccagcaatcatcttttctttttctgtgctcattactgacctccggttgctgaaaatgcggcaacacagtaagacgaaaagtcagtgaagagaacgttcccattacatctgtgtgataaagatcacatagggtatgtcttcatggcgaaaaagtataaaattcttaataaacagccggttatagctccgaaagcgaattatttattagcgaataaatttccatacactggaagggatcttgtcgtacagtttattcatggtcaattcggcgaggcggtgatctgcggcactgtaaaataccgccagttcattatcacttaattcgtatttatttttctcgataacacgctccagcgtgtcaattgtctggcaacgacgtaaacgcattaaataatcggttttcgttaaaggtttttcggacatacttctacctatggttgtaataattttaacaagataaactcgcaggattctctttcgtcgcattgacaaaacaacggaatagtcgattaccactcttccgccatttctgaagatcctgcatattaataccataactactgaacaacataaaggtgtcatccagatattcgtcgatctgctcaatgagcttattgtcttcattatacttaattttgtaattaagtgcgaaggtcgcaatatgctcaatcagttcattcaactggaggttgatcgcgctggttgggtcgtttacccagccatgattgctttcttcaaggtttgcaaggcagtcatgatacagggtttcacagagaaacttaagctgtgcgatatcatgtcttttgggactgtattcatccataacgcgtccccttcttagcggttgaactaacggacacctttcgggatggaaaaaacttactgacctggacttgccctctcgtttgttagcttaactataagccactctttgcaggttttcatcgcattattacgaaaaattacaattaggaaggaagcgggacaggactcactttttcatactagcactaacccgcagcaggtaaaagcagtttgctcgaactattcataacatttcaggattatcgccagatgaaattggtgacactaataccaggattgctctgaatatgacgtaataaccgaggaatgaataaagaattaccgcaaataattaagaatagcctctaaatgattatggattattaaatctattagcgctacttaatataaattaactaacaatcagtattttttatgaattttatccgtggttaatactggttttcgtatgagatcctgagttggtggttcaattactccttaatgttcgtaggttatgcataaaaaaggccgcttacgcggccttagtgattacacgttgtatcaatgatgatcgacagtatggctgtgctcgatatcttcattcttgcggctaaagcggcggcgaaccaccacaaagaataccggaacgaagaagattgccagtaccgttgcggtcaccatcccgcccattacaccggtacctactgcgttctgcgcgccggaaccagcaccagtactgataaccagcggcataacgccgaggataaacgccaggctggtcatcaggatcggacgtaaacgcatccgcaccgcatcaagcgtcgcttcaatcagacctttaccttctttatccatcaagtctttggcgaattcgacgataaggatcgcgttcttcgcgctcaacccaatggttgtgagcaggcctacctggaagtaaacgtcattggtcaggccacggaaggtggcagccagcaacgcaccgataacccccagcggaacgaccagcataacggagaacggaatgctccagctctcgtacagcgccgccagacacaggaacacgacaatcaagctaatcgcgtacagactaggtgcctggttgccggagagacgttcctgataggacatccccgtccagtcatagccaacaccggtaggcagtttgctcgccagttgttccatcagctccattgcttcaccggtacttttacccggtgccgcctggcctaagatttccatggatggcaggccgttgtaacgttccagacgcgggctaccgtactcccaacgagaagaggagaacgcgctgaatggcaccatctgaccatcagcagcacgaacataccagtcgccgatatcatccggcagcatacggtatttcgcttcactcatgacataaactttcttcacacgaccgcggtcgataaagtcgttcacatagctgccgccccatgcagcgcccagagtggtgttaatgtcgttgatagaaacacccagcgcctgcgctttttcctggtcgatatcaatcttaaactgcggggtatcttccagaccgtttggacgtacgctggtcaacatatcagggtgcttcgctgcttctgcaagcaactggttacgcgcctgagtcagtttttcgtgaccaaggccagcctggtcaatcagctcaaagtcaaagccggttgcagtacccagttccacgattgcgggcaggttaaaggcgaaaaccatcgcatctttgatttggctgaaagcgcgtgttgcacgcatggtaatcgcttcaactttgttttcttcgcccggacgatcggcccagtccttcaaggaaacgaacgcaataccggtattctgaccacgtcccgcaaagccgaagccgttaacggcgaacacgctctcaacgttgttcttttctttggtcagatagtaatgcgttacctcattgagcactttctgtgtacgttcctgcgttgcacctgctggcagctgaaccatggtcataaacacgccctggtcctcatctggcaagaaggagcttggcagacgcacgaacagataggccatgccgaccacgatgatcagatacagcaccaggtaacgccccgtactgcgcagaataccgcctacgctgtcggtgtagtggtgcgtgctcttctcgaacatgcggttaaaccagccgaagaagccttttttaccttccccgtgatcgcctttggcaatcggtttcagcatggtggcacaaagagctggagtcaggatcaacgccaccagtacgctcagcgccattgcactaacaatggtaatagagaactgacgatagatagcaccagtagaaccgccaaagaaggccatcggtacgaataccgcgctcagtaccatcgcgataccgaccagagcgccctgaatctgccccatgctcttacgggtagcttcttttggcggcaaaccttcttccgccataacacgctcaacgttttctaccacaacgatggcgtcatccaccaacaggccgatggcgagcaccatcccgaacattgttagcgtgtttatgctgaagccaaaggcggcaaggacggcaaaggtcccgagcaataccaccggtacggcaatggtcggaatcaacgtcgcgcggaagttctgcaggaacagatacataaccaggaacacgaggatgatcgcttcgaccagcgttttaaccacttcgtgaatagagattttcacgaacggcgtggtgtcgtatgggtaaacaattttcagaccgctcgggaagaacggttccatcttcgccagttcagcacggattgccgcagcggtatccagcgcgtttgcaccggtcgccagcttgatccccagaccggaagccggttggccgttaaactctgcgatgatgtcgtagttctcaccacccagctcaatcttcgcgacgtcacgcagcagcacgcgggaaccatcctgattcactttcagcaggattttgccgaactcttcagtagaggtcagacgcgtctgagcaataatagaggcgttaagctgttggcctttcaccggcggcgtaccaccgagctgacccgccgcaacctgggcgttctgcgctttgatggcggtaatgacatcaaccggcgttagctggaatttgttcagctcattcgggttcatccagatacgcatcgcgtactgactaccgaacaactgaacatcacccacgccgctcgtacggctgatggcatctttcatattcgccgccacgtagtcggagatatcctcctgcgtcatggtgccatcggtgttgataacgccgacaaccatcaggaagctgctggaacttttctcaacgctcaccccttgctgctgaacttcttgcggcagcaacggcatcgccagctgcagtttgttctgcacctgaacctgcgcgatatccgcatcagtaccagactcaaaggtcagggtgatctgcacggtacccgtggagtcactgttagaggacatgtacatcaggttatcgataccgttcatattctgttcgataacctgtgtcaccgtgtcctgcactgttttcgcatcagcgccggggtaggaggcggagatcgttactgccggcggtgcaatcgtaggatgttgcgccaccggcagtttgaggatcgccagcccccctgccaacatgatgataatggcgatcacccacgcaaaaatcgggcgatcgataaagaaattaggcatgtcttaacggctcctgtttaagttaagacttggactgttcaggctgagcaccgcttgcggcttgctggttattatcagcggtaacttcttgtgcttttacctggacaccaggacgcactttctgcagcccacttattactacgcgatcgcctgctttcagaccttctgtcaccagccacttatcgccaatagcctggcttgcaacgatcggacgggtttccactttgtcatccgcgccaactaccagtacggtggcatcgccacgcggcgtacgggttacgccctgttgcgggactaaaatagcgtttggattaagcccttcttccagacgtgcgcgcacgaacatacccggcagcagagtgtgatccgggttcgggaagatagcgcgtagggtgatagacccagtggtctgatcaacggtaacgtcagagaattccagcgtaccgtcctgcgggaacttaatgccgtcactggtgatcagactcactttggctttgccgttctcttgtttcagcgtgccattcgccagttcctgtttcaggcgcaggaagtcgttgctggactgggtcacatcaacgtagatcggatcaagttgctgcacggttgccagcgcagtcgcctgaccgttctgtaccaatgcgccttccgtcacgttgctcttaccaatgcgaccgctaatcggagaggtgactttggtgtaagccagattgatccgcgcagtttcaacggcagctttcgccgcagttaccgcagcattcgcctgttgcgcatcagccagagcctgatcgtactcttgcttactgatgtactgagtaccgagcagtttctgataacgattcaccgtcaattgcgcgatattggctgcagcctgggctttcgccagatcacctttcgcactgtcgtatgtcgcctgataggtcgcaggatcaatctgatagagagagacacctgcttcgatgtcgctaccttctttgaaattacgcttcaggataatcccgctaacttgaggacgaacttctgcgatccggtaggcactggtgcgacccggaagctcggttgtgatctgcagaggttcagttttgactgttactacgccaacggcgggcatctgctggccaccttgttgggcctgtttgtcgtcacatcctgttagggctaagctgccactgagcatcagaacgaccgccagaggcgtaaaccctctgtttttgttcatatgtaaacctcgagtgtccgatttcaaattggtcaatggtcaaaagttaataaacccattgctgcgtttatattatcgtcgtgctatggtacatacattcacaaatgtatgtaaatctaacgcctgtaaattcacgaacatatggcacgaaaaaccaaacaagaagcgcaagaaacgcgccaacacatcctcgatgtggctctacgtcttttcagtcagcagggggtaagttccaccagcctgggcgagattgcaaaagcagctggcgttacgcgcggtgcaatctactggcattttaaagacaagagcgatttgttcagtgagatctgggaactgagtgaatccaatattggtgaactagagcttgagtatcaggcaaaattccctggcgatccactcagtgtattaagagagatattaattcatgttcttgaatccacggtgacagaagaacggcgtcgattattgatggagattatattccacaaatgcgaatttgtcggagaaatggctgttgtgcaacaggcacaacgtaatctctgtctggaaagttatgaccgtatagaacaaacgttaaaacattgtattgaagcgaaaatgttgcctgcggatttaatgacgcgtcgcgcagcaattattatgcgcggctatatttccggcctgatggaaaactggctctttgccccgcaatcttttgatcttaaaaaagaagcccgcgattacgttgccatcttactggagatgtatctcctgtgccccacgcttcgtaatcctgccactaacgaataaccctgaatctgactccaggatttttcctggacattttcgtcgttgctattctggttcactgcgtcgtgatattcttgcggtttgactttttcaggtcgttcttcaggttcagaaaccttcattcatcatgactatgttccagtattacaaacgaagtcggcattttgtttttagtgcatttattgcttttgtttttgtcttgttatgccagaacacggcgtttgcgcgggcgagtagcaatggtgatctgccgacaaaagcggacctgcaggcgcaacttgacagtctaaataaacaaaaagatctttctgctcaggacaaactggtgcagcaggatctgacagatacattagccaccctcgataaaatcgatcgcataaaagaagagacagttcagctacggcaaaaagtcgctgaagcgccggaaaaaatgcgccaggcgaccgcggcgttaacagcacttagcgatgtcgataacgacgaagaaacgcgcaaaattctgagcacgctgagcttgcgccagctggaaactcgcgttgcccaggcgctggacgatttgcaaaacgcacaaaacgatctggcgtcttataacagccagctggttagcttacagacgcagcccgaacgcgtgcaaaatgcgatgtataacgctagccagcagctgcaacaaattcgcagtcgtctggatgggactgatgtcggcgagacagccttacgtcccagccagaaagtgttaatgcaggcccagcaggcgttgctgaatgcggagattgaccagcagcgtaaaagcctggaagggaacaccgtcttgcaggataccttgcaaaagcaacgtgattacgtgacggcgaacagcgctcgtctggagcaccagttacaactgttgcaagaagcggtaaacagcaagcgcctgactttaaccgaaaaaacggcgcaggaagccgtctccccggatgaagccgcgcgtattcaggctaatccgctggtgaagcaggaactggaaattaaccagcagttaagtcagcgtctgattaccgcgactgaaaacggtaatcagttgatgcagcaaaacattaaagtcaaaaactggctggagcgggcgctgcaaagcgaacgcaatattaaagagcagattgccgtcctgaagggcagcctgctgttgtctcgtatcctttaccagcaacaacaaacgctgcccagcgcggatgaactggaaaacatgaccaaccgcatcgcggatttgcgtctcgaacagtttgaagttaaccagcagcgtgatgcactcttccagagcgatgcgttcgtcaacaaactggaagaaggtcacaccaacgaagtcaacagcgaagttcacgatgcgttattgcaagtggttgatatgcgtcgcgaattgctggatcaactcaacaaacagttgggtaaccagctgatgatggccattaacctgcaaatcaaccagcagcagttaatgagtgtgagcaaaaacctgaaatccatcctgactcagcaaatcttttgggtgaacagtaaccgtccaatggactgggactggatcaaagcgttcccgcaaagcctgaaagatgaatttaagagcatgaaaatcacggtgaactggcaaaaagcctggcccgccgtttttatcgctttcctcgctggtttgccgctgctgttgattgccgggctgatccactggcgtctgggctggctgaaagcgtatcaacaaaaactggcttccgctgtgggttccctgcgtaacgacagccagctcaacacaccaaaagcgatccttatcgacctgatccgtgcgctgccggtgtgcctgattattctcgcggttggcctgattctgttgaccatgcagctcaacatcagcgaactgctatggagcttcagcaaaaaactggcgatattctggctggtgtttggcctgtgctggaaggtactggagaaaaacggcgttgccgtacgtcacttcggcatgccggaacagcagaccagccactggcgtcggcaaattgtccgcatcagtctcgcattgctgcctatccatttctggtctgtggtggcagaactttccccgctgcatctgatggatgatgtgctggggcaagcgatgattttcttcaacctgctgctgattgccttcctggtatggccgatgtgccgcgaaagctggcgtgataaagagagccacaccatgcgactggtcaccattaccgtgctgagcataatcccgattgcgctgatggtgctgactgctacaggctacttctacactacgctgcgtctggcaggacgctggattgaaaccgtttatctggtgatcatctggaacctgctgtaccagacggtactgcgtggcttaagcgtagcggcgcggcgtatcgcctggcgtcgtgcgctggcgcgtcggcagaatctggtgaaagagggcgcagaaggtgctgaaccgccggaagaacccaccattgcactggagcaagttaaccagcagacgctgcgtattaccatgttgctgatgtttgcgctgttcggtgtcatgttctgggcaatttggtccgatttgatcaccgtgttcagctatctcgacagcatcacgctctggcattacaacggcactgaagctggcgctgcggtggtgaaaaacgtcaccatgggcagtctgttgtttgcgattatcgccagtatggtggcctgggcgttgattcgcaacctgcctggtttactggaagtgctggtgctcagccgactgaatatgcgccagggcgcgagctatgccattactaccatccttaactacatcattattgctgttggtgcgatgacggtgttcggaagcctgggcgtctcttgggataaactccagtggctggccgcagcattatccgtaggtcttggttttggtttacaagaaattttcggtaacttcgtctccggtttgatcattctattcgaacgtccggtgcgtattggcgatacggtaaccattggtagcttcagcgggacggtaagtaagatccgtattcgtgcgacaacgattaccgatttcgatcgcaaagaagtgatcatcccgaacaaagcgtttgttaccgagcgtctgatcaactggagcttgactgacactactacgcgtctggtgatccgtctcggcgtggcctatggctccgatctggaaaaagtgcgtaaagtgttactgaaggcggcgactgagcacccaagggtgatgcacgaaccaatgccggaagtcttctttacggcatttggtgccagcacgttggatcatgagctgcgtctgtatgtgcgtgaactgcgtgaccgtagtcgtactgtcgatgagctgaaccgtactatcgatcagctgtgccgtgaaaacgacatcaacattgcctttaaccagcttgaagtgcatctgcacaacgagaagggcgatgaggtgacggaagtaaaacgcgactacaaaggcgatgacccgacgccagcggtagggtaaaaacgaaagggggcaacatttagttgccccgagattgctaacaaagtgcgcgttgttcatgccggatgcggcgtgaccgccttatccggcctacgaaaccgcaagaattcaatatattgcaggagcggtgtaggcctgataagcgtagcgcatcaggcagttttgcgtttgcccgcaaccttaggggacatttagcgaccccatttatttctcacttttccgcctcatcatcgcgcgttaatttcttttcataatcacgctttacaatatccagcgcgcgcagcacggtactggcagggatctgattttcctccagcagcacaatcaaatcgacagccagtttgacatcgtcaggggcattttccagactcatattctctccattgttagcgggttaaacgcgctaacctgttttcgattttttccagcgcatggcggcagcgtgccaggcgcgcttcataggcttccacttcacgatgcagcgtttgctgttccacgagatcggtcacccgcgccagacgggctctgcgttcggcaaccatctcacgtagccgccgctcaaaatcctgatgctgaatacgtttacgctgccagcgggcaattttcggtggtgcactgtcccactcgcgcaaactccaggcggaggcttcacgcgcgatggcttccagttgtgccgccagatgttccgccagccaggccacttgcggcagctgttgctgctcaactgcatgacgaagcgcagccagattatcgcccgcctcgtcgagacaagcctgtagtgttgtcgcacgagtctgaaaaagatgcctgtcgaaacgagcacttagcgtggcgaactgactcaccggggcacaacgctgacgcagcgtagcgagctgtccttccagtttttccagcagcagggcggttttcacgataagacctcaatgaaaatgataattgttatgctaaagtagccactctgtaagctgacaacactcaatatgcaacgaatcattttaatcatcattggctggctggcggtagtgctgggtacgctgggcgtggtattaccggtattaccgacgacgccgtttatcctgctggcggcctggtgctttgcccgttcttccccgcgctttcacgcctggttgctgtaccgcagttggtttggcagctatctacgtttctggcagaaacatcatgcgatgccgcgcggcgtcaaaccgcgggcgattttgcttattttgctcacgtttgccatttctctgtggttcgtccagatgccatgggtgcgcatcatgttgctggtaattctcgcctgtttgcttttctatatgtggcgaattccggtgattgatgaaaagcaagaaaagcactgaagcacaacaatcgcagttgcaattattgcgtacagccagtacattctggcgttttcgagcacaggcgcaggcggtcaaaggttaaacaactgttacttttgatacgtttaaaacgcgccgtgagtaccaccgtaacaagcaggcatacacttatgaccgcgactgcacagcagcttgagtatctcaaaaatagcatcaaaagcattcaggactacccaaaacccggcattcttttccgcgatgtcaccagcttactggaagacccgaaagcttacgctctcagcatcgacttgctggttgagcgttacaaaaatgcgggcattaccaaagttgtcggcaccgaagcgcgtggcttcttgtttggcgctccggtagctctgggtctgggcgttggctttgtaccggtccgtaaaccgggcaaactgccgcgtgaaaccatcagtgaaacttacgacctggaatacggcaccgatcagctggagatccacgttgatgccatcaaaccgggcgacaaagttctggtggtggacgacctgctggcaaccggcggcactatcgaagcgaccgttaaactgatccgtcgtctgggtggtgaagtggctgacgctgcgttcattatcaacctgttcgatctcggcggcgaacagcgtctcgaaaaacagggcattaccagctacagccttgtcccgttcccgggccattaattatcgccagtcttgtgctgcccacgctacggacagcacaagatgtgcattcagcctcgccgttctgacggggctgtgttagcattaccccttcgtgaatccaccttccagcgtttcagagcctgccaatgagttatcaggtcttagcccgaaaatggcgcccacaaacctttgctgacgtcgtcggccaggaacatgtgctgaccgcactggcgaacggcttgagcttagggcgtattcatcatgcttatcttttttccggcacccgtggcgtcggaaaaacctctatcgcccgactgctggcgaaggggctaaactgcgaaaccggcattaccgcgacgccgtgcggcgtgtgcgataactgtcgtgaaatcgagcaggggcgctttgtcgatctgattgaaatcgacgccgccagccgcaccaaagttgaagatacccgcgacctgctggataacgtccagtacgctccggcgcgtggtcgtttcaaagtttatctgatcgacgaagtgcatatgctgagccgccacagctttaacgcactgttaaaaacccttgaagagccgccggagcacgttaagtttctgctggcgacgaccgatccacagaaattgccggtgacgattttgagtcgctgtctgcaatttcatctcaaggcgctggatgtcgagcaaattcgccatcagcttgagcacatcctcaacgaagaacatatcgctcacgagccgcgggcgctgcaattgctggcacgcgccgctgaaggcagcctgcgagatgccttaagtctgaccgaccaggcgattgccagcggtgacggccaggttagtacccaggcggtcagtgcgatgctgggtacgcttgacgacgatcaggcgctgagcctggttgaagcgatggtcgaggccaacggcgagcgcgtaatggcgctgattaatgaagccgctgcccgtggtatcgagtgggaagcgttgctggtggaaatgctcggcctgttgcatcgtattgcgatggtacaacttagccctgctgcacttggcaacgacatggccgccatcgagctgcggatgcgtgaactggcgcgcaccataccgccgacggatattcagctttactatcagacgctgttgattggtcgcaaagaattaccgtatgcgccggaccgtcgcatgggcgttgagatgacgctgctgcgcgcgctggcattccatccgcgtatgccgctgcctgagccagaagtgccacgacagtcctttgcacccgtcgcgccaacggcagtaatgacgccaacccaggtgccgccgcaaccgcaaagtgcgccgcagcaggcaccgactgtaccgctcccggaaaccaccagccaggtgctggcggcgcgccagcagttgcagcgcgtgcagggagcaaccaaagcaaaaaagagtgaaccggcagccgctacccgcgcgcggccggtgaataacgctgcgctggaaagactggctagcgtcaccgatcgcgttcaggcgcgtccggtgccaagcgcgctggaaaaagcgccagccaaaaaagaagcgtatcgctggaaggcgaccactccggtgatgcagcaaaaagaagtggtcgccacgccgaaggcgctgaaaaaagcgctggaacatgaaaaaacgccggaactggcggcgaagctagcggcagaagccattgagcgcgacccgtgggcggcacaggtgagccaacttagcctaccaaaactggtcgaacaggtggcgttaaatgcctggaaagaggagagcgacaacgcagtatgtctgcatttgcgctcctctcagcggcatttgaacaaccgcggtgcacagcaaaaactggctgaagcgttgagcatgttaaaaggtagtacggttgaactgactatcgttgaagatgataatcccgcggtgcgtacgccgctggagtggcgtcaggcgatatacgaagaaaaacttgcgcaggcgcgcgagtccattattgcggataataatattcagaccctgcgtcggttcttcgatgcggagctggatgaagaaagtatccgccccatttgatcgtaagcacagcttacgttcgtcatccttaacgtgattgagagagaaacctatgtttggtaaaggcggtctgggtaacctgatgaagcaagcccagcagatgcaagaaaaaatgcagaaaatgcaggaagagatcgcgcagctggaagtcaccggcgaatctggcgcaggtctggtaaaagtgaccatcaacggtgcacacaactgccgtcgcgtagagatcgacccgagcctgctggaagacgacaaagagatgctggaagacctggtggctgcagcattcaacgacgcagcacgtcgtattgaagaaacgcagaaagaaaaaatggcctctgtatcctccggaatgcagctgccgcctggctttaagatgccgttctgatgcaaaccagcccgctgttaacacagcttatggaagcactgcgctgtctgccgggcgttggcccgaagagcgcgcagcgtatggcgttcacgctgcttcagcgcgatcgtagcggcgggatgcgtctggcgcaggcgctcacccgggcgatgagcgaaatcggccactgcgccgattgccgcactttcaccgaacaggaagtctgtaacatctgtagcaatccgcgtcgtcaggaaaacggtcaaatctgcgtggtggagagtccggcggacatctacgccattgagcagacggggcagtttagtggtcgttattttgtgttgatggggcatctgagtccgctggacggcatcggtccggatgatatcgggcttgatcgtctggaacagcgtctggcagaggaaaaaatcactgaagtgatcctcgccaccaaccccacggttgaaggtgaagctaccgctaactacattgccgagctttgcgcgcaatatgacgtggaagccagccgaatcgctcatggcgttccggttggcggcgagctggaaatggtcgacggcaccacgttgagtcactcccttgccgggcgtcataagattcgtttttaagcaaacgagagcaggatcacctgctctcgcttgaaattattctcccttgtccccatctctcccacatcctgtttttaaccttaaaatggcattattgaggtagacctacatgaaaggacaagaaactcgtggttttcagagtgaagtgaaacagcttctgcacctgatgatccattctctctattccaataaagaaatcttcctgcgtgagcttatctctaacgcctccgatgcggcggacaagctgcgtttccgtgcgctctctaacccggacctgtacgaaggtgatggcgaactacgcgttcgtgtctctttcgataaagacaagcgtacgctgaccatctccgataacggcgtggggatgacccgcgacgaagtgattgaccatctggggactatcgctaaatccggtaccaaaagtttcctcgaatccctgggttctgaccaggcgaaagacagccagctgatcggtcagtttggtgttggtttctactctgcgtttatcgtggccgacaaagtgaccgtgcgtactcgcgcggcaggcgaaaaaccagaaaatggcgtcttctgggaaagcgctggcgaaggtgaatacaccgttgccgacatcaccaaagaagatcgtggtactgaaatcaccctgcatctgcgtgaaggcgaagacgagttcctcgatgactggcgcgtgcgttccatcatcagcaaatactccgaccatatcgcgctgccggtagagatcgaaaaacgcgaagagaaagacggcgaaaccgttatctcctgggagaaaatcaacaaagcgcaggcgctgtggactcgtaacaagagcgaaatcaccgatgaagagtacaaagagttctacaaacacatcgcccacgactttaatgatccgctgacctggagccacaaccgtgttgaaggtaagcaggagtacaccagcctgctgtacatcccgtcccaggctccgtgggatatgtggaaccgcgatcataaacacggcctgaaactgtatgttcagcgtgtgttcatcatggacgacgcagaacagttcatgccgaactatctgcgcttcgtgcgtggtctgattgactccagcgatctgccgctgaacgtttcccgtgaaatcctccaggacagcacggtaacgcgtaacctgcgcaatgcgctgaccaagcgtgtgctgcaaatgctggaaaaactggcgaaagacgacgcggaaaaataccagaccttctggcaacagtttggcctggtactgaaagaaggtccggcggaagatttcgctaaccaggaagcgatcgccaaactgctgcgttttgcttctacccataccgattcttctgcgcagaccgtatctctggaagactacgtttcccgcatgaaagaagggcaggagaaaatctactacatcaccgcagacagctatgcggcagcgaagagcagcccgcacctggaactgctgcgtaagaaaggcatcgaagttctgctgctttccgaccgcatcgatgagtggatgatgaactatctgactgagttcgacggtaaaccgttccagagcgtgtctaaagttgacgagagccttgaaaaactggctgacgaagttgatgagagcgcgaaagaagcggagaaagcactgactccgttcatcgaccgtgtgaaagccctgctcggcgagcgcgtgaaagatgtccgtctgactcaccgtctgaccgatacgccagcgatcgttagcaccgacgcggacgaaatgagcactcagatggcgaaactgttcgctgcggcgggccagaaagtgccagaagtgaaatacatcttcgaactgaacccggatcacgtactggtgaaacgtgcggcagatactgaagatgaagcgaagttcagcgagtgggtagaactgctgctggatcaggcgctgctggcagaacgcggcacgctggaagatccgaacctgtttattcgtcgtatgaaccagctgctggtttcctgatgtaatgccggatgaccttcgtgtcatccggcatttttcttttcatcatctgcactttccgcaaattatctcgccattaaccgtttcagccccaggtgcctttcttgaggcaatcgcctgttggtggtatcgtttatcgctttttcaaaaaattcgacacattttaaggggattttcgcaatgcgtatcattctgcttggcgctccgggcgcggggaaagggactcaggctcagttcatcatggagaaatatggtattccgcaaatctccactggcgatatgctgcgtgctgcggtcaaatctggctccgagctgggtaaacaagcaaaagacattatggatgctggcaaactggtcaccgacgaactggtgatcgcgctggttaaagagcgcattgctcaggaagactgccgtaatggtttcctgttggacggcttcccgcgtaccattccgcaggcagacgcgatgaaagaagcgggcatcaatgttgattacgttctggaattcgacgtaccggacgaactgatcgttgaccgtatcgtcggtcgccgcgttcatgcgccgtctggtcgtgtttatcacgttaaattcaatccgccgaaagtagaaggcaaagacgacgttaccggtgaagaactgactacccgtaaagatgatcaggaagagaccgtacgtaaacgtctggttgaataccatcagatgacagcaccgctgatcggctactactccaaagaagcagaagcgggtaataccaaatacgcgaaagttgacggcaccaagccggttgctgaagttcgcgctgatctggaaaaaatcctcggctaattcgaaagcgcgcacggacagtcccctcgccccctcggggagagggttagggtgaggggaacaggcccgcacaagcaaacttatcagcaatctcaggccggatattcattcggccttttacaaaaacctcaatctgcgctattcctttttctgatttgacctctcacagcaattagttcttcttcctcacttttccgctacaattatcaacaagttgaatcgataagaggcggtaatgcgtcagactaaaaccggtatcctgctggcaaacctgggtacgcccgatgcccccacacctgaagcggtaaaacgctatctgaaacaatttttaagcgacagacgcgtggttgataccagtcggttgttatggtggccattgctgcgcggcgtgattttgccgctgcgcagcccgcgtgtggcgaagctgtatgcctctgtctggatggaaggtggcagcccgctgatggtttacagccgccagcaacagcaggcgctggcacaacgtttaccggagatgcccgtagcgctgggaatgagctacggcagcccaagtctggaaagcgccgtagatgaactcctggcagagcatgtagatcatattgtggtgctgccgctttatccgcaattctcctgttctacggtcggtgcggtatgggatgaactggcacgcattctggcgcgcaaacgtagcattccggggataagctttatacgtgattacgccgataaccacgattacattaatgcactggcgaacagcgtacgcgcttcttttgccaaacatggcgaaccggatctgctactgctctcttatcatggcattccccagcgttatgcagatgaaggcgatgattacccgcaacgttgccgcacaacgactcgtgaactggcttccgcattggggatggcaccggaaaaagtgatgatgacctttcagagccgctttggtcgggaaccctggctgatgccttataccgacgaaacgctgaaaatgctcggagaaaaaggcgtaggtcatattcaggtgatgtgcccgggctttgctgcggattgtctggagacgctggaagagattgccgagcaaaaccgtgaggtcttcctcggtgccggcgggaaaaaatatgaatatattccggcgcttaatgccacgccggaacatatcgaaatgatggctaatcttgttgccgcgtatcgttaaagctgagcggtaaagaactgagcgccgtcgcgaagagcctcgtcggcggttttcatcatccgactataatgcaaaaaggcgtgcagcgtgcctgggtagagtttgaactcacagggctgctgatgcgccgctaacgtctggtaaagcagacggctgtcatccagcagcggatcgaactccgccccggcaataaaacagggcggaacttcgcgagtgagatcattattaaacagacagtaatacgggctctcgcggtccgcgtcgttgcttaaatatgcctcttcgtacatctgcaaatcctgttgcgttaagccatcccagacaccgcccaacagacgacgagtcacggaatcccgtaatccgtaaagcccataccacagcaaaacgcccgcaactttaccgcaatcgatctgtttatcacgcaaccacaacgcactggcgagcgccagcatggcacctgcggaatcaccggcaaagccaatgcgggacatattgatttgataatcctccgcctgctggtggaaataacaacaagcagccacaatttcctctatcgcttgcggaaaacgcgcttcaggactaagggtgtaatcaataccaatcaccgtacattggctgtagcttgccagcaggcgcatgatgcgatcgtgggtatcgagattgccgagaataaaaccgcctccatgcaaataaaatagcgtcgctgggctatctggctgcggacaaaagagacgtgtttccacctgcccatattttgttggaaccatgtaagctctggttgccatttctggagcgcccgcattccagaatcggcgctcaagcgtgtaatactgtcgttgctcagcaatcgttcccgttgcgggccagggcggtaaatccggctgaagagtattcacaacggtcttcatttcagcagaaataaggtccagaacaggtagtttgttttccggcttcatacaaaaactcctttcaaattacgtcattgtaaggaaccactgccatgaaaatgcgatcccgcctgctgatattgaaactggctgcgtctcgcgcgctcccgtcagattgtgttaacattcgccgctcagttaaccacccgtaaaaacaaccatgaaatttcccggtaaacgtaaatccaaacattacttccccgtaaacgcacgcgatccgctgcttcagcaattccagccagaaaacgaaaccagcgctgcctgggtagtgggtatcgatcaaacgctggtcgatattgaagcgaaagtggatgatgaatttattgagcgttatggattaagcgccgggcatagtctggtgattgaggatgatgtagccgaagcgctttatcaggaactaaaacagaaaaacctgattacccatcagtttgcgggtggcaccattggtaacaccatgcacaactacagcgtgctcgcggacgaccgtagcgtgctgctgggcgtcatgtgcagcaatattgaaattggcagttatgcctatcgttacctgtgtaacacttccagccgtaccgatcttaactatctacaaggcgtggatggcccgattggtcgttgctttacgctgattggcgagtccggggaacgtacctttgctatcagtccaggccacatgaaccagctgcgggctgaaagcattccggaagatgtgattgccggagccagcgcactggttctcaccagttatctggtgcgttgcaagccgggtgaacccatgccggaagcaaccatgaaagccattgagtacgcgaagaaatataacgtaccggtggtgctgacgctgggcaccaagtttgtcattgccgagaatccgcagtggtggcagcaattcctcaaagatcacgtctctatccttgcgatgaacgaagatgaagccgaagcgttgaccggagaaagcgatccgttgttggcatctgacaaggcgctggactgggtagatctggtgctgtgcaccgccgggccaatcggcttgtatatggcgggctttaccgaagacgaagcgaaacgtaaaacccagcatccgctgctgccgggcgctatagcggaattcaaccagtatgagtttagccgcgccatgcgccacaaggattgccagaatccgctgcgtgtatatagccacattgcgccgtacatgggcgggccggaaaaaatcatgaacactaatggagcgggggatggcgcattggcagcgttgctgcatgacattaccgccaacagctaccatcgtagcaacgtaccaaactccagcaaacataaattcacctggttaacttatagtagcttagcgcaggtgtgtaaatatgctaaccgtgtgagctatcaggtactgaaccagcatagtcctcgtttaacgcgcggcttgccggagcgtgaagacagcctggaagagtcttactgggatcgttaagttatcgtcggttcgtaggccagataaggcgttcacgccgcatctggcatttggctctcgatgcctgatgcgacgctggcgcgtcttatcatgcctacatatttttcatattttacatccggcaaccaccgtttaccccgtcaccacctcacccgccggtggcgtttccagcagttccagcatggtacgggcgatttcacgctcgcccatcactacctgattcgcaccacgttcggtgatatacgccacttcatcgtcataatgggcgcgggcaataatctcaatatccggatttttcgcgcgggcagatgccacaatctcacccgcttcataaccgttgggaatcgtcaggatcagccattttgcacattccagatgcgccagttgcataatttcttcgttcgccgcattgcccaatactgcgcggaccccgcgctctcgcagctcatcaacacgggttcgactcgtctcaatcaccaccagcggaatatcagaggcgagcaatttctcccccagcaggctgcctacacgaccgtaacccaccagtagcgcatggttgcaaatatccactgggatctgcttctcttcttcgattgcctcttccagcgtctgctcttccagcgtttcggtcttcgccagatatttctccagtagtgcgaacagtaccgggttgagcataatgctcaggatcgcccctgccagtaccaggttttgtccggcctgcggcagtaaattcaatgccattcccagtcccgccaggataaacgcgaactcaccaatctgcgccaggctggcggcgatggttaatgccgtacgttgggagtgaccaaacagtcgcaccaggaaaaatgcggctaagctcttaccaaacagaataatcgccagcgtcgccagcactgccagcggttgctgaatcagaattaacggatcaaacaacatcccgacggagacaaaaaacagcaccgcaaacgcgtcgcgcaatggcagcgtatcgtgggcggcacggtgactcagttcagactcgttcagtaccatcccggcaaagaacgcaccgagtgcaaaggagacatcaaacagctctaccgcaccaaaggcaacccctaacgccagcgccagcacgctcagggtaaacagctcgcgagaaccggttgccgcgctgcgtgccataatccacggcaccagacggcgacctaccagcatcataatggcgataaatgcgatcactttgccgatggtgatccccatatcgactgcaagagtggcaaagcccacatcgccctgttccatcattcctgccactgcgggcagcaacaccagcgtcagaaccattaccaggtcttccacaatcaaccaaccgatggcgatttgcccacgctgactgtcaattaattgccgttcttcaagtgcgcgcagtaacaccacggtactggcggtggaaagacataaaccgaacacgataccggtcattaagctccagcccagcacggcagagagcgccatacccagcagcgtcgccacggctatctgggcgatcgcaccgggaatggcgatggcctttaccgccatcaaatccttcaggctaaagtgcaaaccgacgccaaacatcaacagaatgacgcccagttcagccagttccggggcaagcttggtatcggcaacaaagcccggagtgaatggtcctgccagcacacccgctaacagatatcccaccagaggagaaatacgtagtttattggccagcatgccgaggataaaggcgagcacaaggccgccaacaatggtggtgataagcggggtggcgtgatgcattccgtctccttttcctggtggttattgtccatttttggccgggaaaaccaaaattacaggtaatagtttatgacaatttcattgatgatgttcatgaataattattgaattttgcagaaaaatggaattagctgcaaaaaaagcacggatcggaaaacagaaggcggtttaacagaggaaaggcttatggcgactgtaaaacgatgcagccaaagtttgcctttggctgcaatgaaatcagtctttatgccggttatcaggcaggaatatggtcaacatccccaatagtggcaggaaagcacagattttatagactaactcgatgctggtgtgatcggcgataagccccagaactgccgctcccagacctcccatgccaaaagcaaaaccgaaaaagagtccagaaaccataccgatacgtcctggaagcagctcctgagcgtagaccagaatggcagagaatgcgctagcgaggataaatccaataatcaccgttaaaacccccgtccagtgcaggctggcgtagggtaaaatcagcgtaaacggcgcaacgccgaggatagagccccaaatcacatatttccgcccaattttatcccctacaggcccgccgatcaccgtacctgccgcaacggcaaacaggaaggcaaacagatgaagctgagcattctggatagataatccgaatttttgcatcagataaaaggtgtaatagctgctgatgctcgccatatagaaatatttgctgaaaatgaggattaacagaatgctgaccgccagtacaactttattgcgcggcagtggattgataatcgtcgctttgggttttcctttattcattcggtgctgtgcgctgtaccaacggctgatttgcgccaacaccacgatcgccagcagtgccgcaagcacaaaccaggcaacgttgcctttgccataaggcgcgataatcaccgccgccagcaagggtcccagggaactgccaaagttgccgccgacctgaaagatagattgcgccaggccatgccgcccgccggaagccatacgggccacgcgagaagattccggatgaaagacgctactaccggtaccgaccagcgccgccgccagcagaactgcgccaaaactgcccgccagcgcaagcagcaccagaccgcttaaggtaaagcacatgccaattggcaagctccatggcatcggatatttatcggtccagtagccgaccactggttgcagtaggctagaggcgagctggaaggtgagggttatcatgccaatctgcataaatgtcagagaaaattcactctgaagcagcggataaatcgccagaatcaggctttggatcatgtcgttcagcagatgactgaggctgatagcacctaaaataccaaagcttgttcgggccttggtcgtactcgcagccgcgcccgccacaggctggggttgttcactcattgccataggaaagtcactttttcagggttgcgatgtaaagaatgatcttatttgtgattattaccagactaacatacctgtatgcgtcgtctgaaggaagtctcaacgccgaatacagaatttctaatctggatgcagatttatcttcaccggacgcagacttgtctatgatgtcgcgtcatactatttttcaacacgttgaaatcaggtcagggagagaagtatgaaattattgcagcggggcgtggcgttagcgctgttaaccacatttacactggcgagtgaaactgctctggcgtatgagcaggataaaacctacaaaattacagttctgcataccaatgatcatcatgggcatttttggcgcaatgaatatggcgaatatggtctggcggcgcaaaaaacgctggtggatggtatccgcaaagaggttgcggctgaaggcggtagcgtgctgctactttccggtggcgacattaacactggcgtgcccgagtctgacttacaggatgccgaacctgattttcgcggtatgaatctggtgggctatgacgcgatggcgatcggtaatcatgaatttgataatccgctcaccgtattacgccagcaggaaaagtgggccaagttcccgttgctttccgcgaatatctaccagaaaagtactggcgagcgcctgtttaaaccgtgggcgctgtttaagcgtcaggatctgaaaattgccgttattgggctgacaaccgatgacacagcaaaaattggtaacccggaatacttcactgatatcgaatttcgtaagcccgccgatgaagcgaagctggtgattcaggagctgcaacagacagaaaagccagacattattatcgcggcgacccatatggggcattacgataatggtgagcacggctctaacgcaccgggcgatgtggagatggcacgcgcgctgcctgccggaagcctggcgatgatcgtcggtggtcacagccaagatccggtctgcatggcggcagaaaacaaaaaacaggtcgattacgtgccgggtacgccatgcaaaccagatcaacaaaacggcatctggattgtgcaggcgcatgagtggggcaaatacgtgggacgggctgattttgagtttcgtaatggcgaaatgaaaatggttaactaccagctgattccggtgaacctgaagaagaaagtgacctgggaagacgggaaaagcgagcgcgtgctttacactcctgaaatcgctgaaaaccagcaaatgatcagcctgttaagtccgttccagaacaaaggcaaagcgcagctggaagtgaaaataggcgaaaccaatggtcgtctggaaggcgatcgtgacaaagtgcgttttgtacagaccaatatggggcggttgattctggcagcccaaatggatcgcactggtgccgactttgcggtgatgagcggaggcggaattcgtgattctatcgaagcaggcgatatcagctataaaaacgtgctgaaagtgcagccattcggcaatgtggtggtgtatgccgacatgaccggtaaagaggtgattgattacctgaccgccgtcgcgcagatgaagccagatagtggtgcctacccgcaatttgccaacgttagctttgtggcgaaagacggcaaactgaacgaccttaaaatcaaaggcgaaccggtcgatccggcgaaaacttaccgtatggcgacattaaacttcaatgccaccggcggtgatggatatccgcgccttgataacaaaccgggctatgtgaataccggctttattgatgccgaagtgctgaaagcgtatatccagaaaagcagcccgctggatgtgagtgtttatgaaccgaaaggtgaggtgagctggcagtaatccgaaagtgccggatgtttgcatccggcacaatgcttaatcgcggcgggcgatatcagcaaatttggcatcgaggatctttgccagatcgcctgccgccagttcgatatccagtccgcgcttgccgccggaaacataaatagtggcaaattcttgtgcgggggcgtcgataatcgttggcagacgttttttctgccccagtgggctaatccccccaaccaggtatcccgtgctacgctgcgcgaccatcggatcggccatctcaactttcttggcacccagcgcttttgctacttttttaagatccagttgacctgcgaccggcgtaacggccacggcaaggtgtttcatatcaccgttcactgccaccagcagcgttttgtagacctgatccggattcaaacctaattttttgacgacttcatcgccaaaattggtttcagccggatcgtgctcgtaggtatggatttgaaagctaatcttgttttttcgagtaatttaactgcgggtgtcatggtaattttcctgccttaaacaaaaaaacgaagcaagcatacgcctgatggcggtccaaaaaaaagagtcatcttgcctaagagtattggcaggatggtgagattgagcgacaatcgagttacaccgtcgcttaaagtgacggcataataataaaaaaatgaaattcctctttgacgggccaatagcgatattggccatttttttagcgcaacatttgcggcaaattcccttctccatacaggtgtagtgcaccgaccgcgaccacatatcgccccggcggcatggcgcgtaatttatcccgccaggcgagatttcgctgatgcatcagcacatcgtacaggctctgactgaacgtattgggcagcgttatatcattattttgcggcggtgcattcagccaccagctcatcatttgttgcagcaaccgtgcgttggtatgccagtgggtcagcgtatcgtccagcagcgccagtcctttgtcagggagctggagcaacatggcaatctggttttcagccccttccagttcaatcacgggtttatgttgttgcttcgccgcctgcaatagctggtaatcgataccgtattctgcccgcagccccagtttttgtgcctgcgtcgcctgaagaaccatcgcgatttgccacagcggttgggtagaaaagagactgggagaaatgcccatctcctggctaatgtgctgcaggttttggagttgctcctcgctaatgcgctcttccagcgcctcgcaggcaggcaaattagcaaaaggcgtatcgctggtggaaacatccgcctcgacgatcagcgcatcggcgtttttgagctttttgagcaaacgggtgggcaggggagccatatcgtggctacccatatgaatactgccaatcagatgaaaatggcgattgccggggagggtgatatcgatggcaggccaggtgtaatgattaccgcgcagcgcggcccaaagcgtttttacccggtacaacagatccatacgacctccctttgtgaaatatcatgctagcgcgcggtgagggatggcgcaaatggagttggagacttgtttaatgtgtttgtatgattcagtatgttcttgcatcgctattcacaaggaagcaacagttaaaaaccatgaaacaggcaacaagaaaaccgacgacacccggagatattcttctctatgaatatctggaaccgctcgatttgaaaatcaatgagttagcagagttgctgcatgttcatcgtaatagcgtcagtgcactgatcaataacaatcgtaaactcactactgagatggcatttcgtctggcgaaagtttttgataccacagtcgatttttggctaaacctccaggcggcggttgatctttgggaagttgaaaacaacatgcgcacccaggaagaattgggacggattgaaacagtggctgaatatttggcacgccgtgaagagcgtgcaaaaaaggtcgcgtaaggccaaaacatcgcttcatctcgtaggccggataaggcgttcacgccgcatccggcatccgagcaccattgcctgatgcgacgcttacccgtcttatcaggcctacaaacttgtgcctgaaccgtaggccggataaggcgtttacgccgcatccggcatccgagcaccattgcctgatgcgacgcttacgcgtcttatcaggcctacaaacctgtgcctgaaccgtaggccggataaggcgtttacgccgcatccggcagtcatgcgtcgatgccaaatgcgccaccctaaagcagcgcatccgcaatgatgtacttattccttcggtttaaaccgcagcaaccggttggcgttactcactacggtaatgctgctgagcgccattgccgctccggcaactaccgggttaagcagtgttccagtgaacggccacaaaataccggcggcgaccggaataccgatactgttgtagataaacgcaccgagcaggttctgcttcatgttgtgcagcgttgcgcgggaaatagcgagcgcatccgcaacgcccatcaggctatggcgcatcagggtaatcgccgcggtttcaatggcaacatcactgccgccacccatcgcaatgccgacatccgcctgagccagcgctggcgcgtcgttaatgccgtcgcccaccattgccacctaacgtccttcactttgcagatgtttgatcgcttcggctttaccgtccggcagcaccccggcgatcacctcatcaatccctgcttctttggcgatcgcattggcggtggttgggttatccccggtcaacatcaccagacgatatcccgctttatgcaggcgttgcagcgccgccacgctatcactacgcaacggatcgcgtactgccagcagggctaccgctttcccgtcaaccgccagcagcacaggcgttgccccttggcttgcctgagcagtaatctccgcttcgatagctttggtaccaacctgttgctcatttaacagcgcctgattgcccagcaataacgcatgaccttcagcttcaccgctcacgcccagcccgcgcaatgtgcggaaaccgttgacctgcggtagctgcatatcacctgctttatcgaggatcgctcgtgccagcggatggctggaaccttgctccagtgccgccgccagacgcaatgcctgcgcttcatcaacatcagcaaatgttttcactgcgacaacctgcggcttcccttcagtcagcgtcccggttttatcgaacactacagtgtcgagtgtactggcgcgttgcagcgcgtcagcgtcccgcaccagcacgccaaactcagccgcccgcccgacgccggaaataatgctcatcggcgtcgccagccccagcgcacacggacaggcaataatcagtaccgtggtggcaatcaccagggtatagacaatctgcggtgccggaccaaagaaataccagattgccgcactgacaagcgcaataaccaccactaccggcacaaatacggcactgattttatccgccagctgaccgatttctggcttgctgctctgggcctggcgcaccatgcgaatgattcgactcagcgtagtatggctgccaaccgcactggcacgaaacagcacactgccgtcctgtaccactgtcccggcatggacgctatcgccttcgcctttttgctgcgggattggttcgcccgtcagcatcgcttcatccagccatgcttcgccctgggtaatctcgccatctaccggcacgcgatcgccggtcgtcaggcgcagcaacatacctggctgcacttctgccagaggcacgcttttttcaccttcgtcagtaaccaggcgtgccgtcggcggggttaaatcgagtaacttttccagcgccttagaagaacgctggcgtgcgcgcgcttccagcatatggccgagattgatcagaccgataatcatcgcgctggcttcgtaataaagatgtcgcgcttccatcgggaaccactgcggccacaggttgacgctcatgctatagagccacgccacgccagtacccagcgccaccagcgtatccatcgtcgccgcaccgttcagcaggcttttccatgcactgcggtaaaaatggccgccggcgaaaaccatcactgccagggttatcaggccgataaccaaccacaggctgcggttgtcagcggtgaccatcatgttatcgccgatcatcccccagaccatcaccgggatacccaccgccagtgcgacaattgcctgccagcggaagcgcttcatcgtagcgacggcggtttcttgctggcgctcgcggcgtttagcgtcatcttcaatcgcttccgcgccgtagcccgctttttccaccgcctgcactaaatcttgtggggaggcactgcccatcaccagcgcagtacgctccgccaggtttacccgtgcctgagtgacgcccggtacgctttgcagcgcattttgtacgcgggtgacacagctggcgcagctcatgccgctcagcagcaactgctggctgtcatcgtcatcggcggtcgctgccggaagcgcctcagaaaccgctgtcagtgcttcgctcgggatactactctccgccagcggtttagcctttgggtggcttacagatgcgtcataacccgcttgtttgatggtttcgatcagctgttctgcactggcagtcccggtaacgtgcgcttcagtgatagacacatccgcctgctcaacatccggacgctgttcaagactttctttcacgcgtttaacgcagtgaccgcaggacaggccgtccagggtcaggtcgatagtttgactcataaaacactcctttaagacagttttgactggctgtgataaaggttaaaccttccagcaaggggaaggtcaagaaattaataaaccaggcgggtaaaagtccgtaaagattaaaaaatcggctcgatttgcatcaggattagacatttatctctttgttttcctgtagttaagttgcgggtgctaagttaaatcaggatgcctgaaaatcggcaccggggtgaggaattacctcccgcatctataaaaaggagttaacaaaagatgttagatgcaaacaaattacagcaggcagtggatcaggcttacacccaatttcacagtcttaacggcggacaaaatgccgattacattccctttctggcgaatgtaccaggtcaactggcggcagtggctatcgtgacctgcgatggcaacgtctatagtgcgggtgacagtgattaccgctttgcactggaatccatcagcaaagtctgtacgttagcccttgcgttagaagatgtcggcccgcaggcggtacaggacaaaattggcgctgacccgaccggattgccctttaacagtgttatcgccttagagttgcatggcggcaaaccgcttagcccactggtaaatgctggcgctattgccaccaccagcctgattaacgctgaaaatgttgaacaacgctggcagcgaattttacatatccaacagcaactggctggcgagcaggtagcgctctctgacgaagtcaaccagagcgaacaaacaaccaacttccataaccgggccatagcctggctgctgtactccgccggatatctctattgtgatgcaatggaagcctgtgacgtgtatacccgtcagtgctccacgctcctcaatactattgaactggcaacgcttggcgcgacgctggcggcaggtggtgtgaatccgttgacgcataaacgcgttcttcaggccgacaacgtgccgtacattctggccgaaatgatgatggaagggctgtatggtcgctccggtgactgggcgtatcgtgttggtttaccgggcaaaagcggtgtaggtggcggtattctggcggtcgtccctggagtgatgggaattgccgcgttcagtccaccgctggacgaagatggcaacagtgttcgcggtcaaaaaatggtggcaagcgtcgctaagcaactcggctataacgtgtttaagggctgatcatgatgaacacggaaggtaataacggtaacaaacctctcggtctatggaacgtcgtttccatcggcattggggcaatggtgggggcggggatcttcgcgctgctggggcaggctgcattgctaatggaagccagcacctgggtcgcctttgcttttggcggtattgtggcgatgttttccggttatgcctatgcgcgtctgggggcgagctatcccagcaatggcggcattatcgacttctttcgtcgcggattaggcaacggcgtctttagcctggcgctcagcttactgtacctgttgacgctggcggtgagcatcgccatggtcgcccgtgcttttggcgcttatgccgtgcagtttttgcatgaaggcagccaggaggagcaccttattttgctctacgcgttggggatcattgcggtgatgacgcttttcaactccttaagcaaccatgcggtagggcggctggaagtgatcctcgtcggcattaaaatgatgatcctgttattgctgattattgccggtgtctggagcctgcaaccggcgcatatttccgtctctgcgccccccagctccggtgcgttcttctcctgtattgggataactttccttgcctatgcgggctttggcatgatggcgaacgcggcggataaagtgaaagatccgcaggtcattatgccacgggcgtttctggtggcgattggcgttaccacgttgctttatatcagcctggcactggttttgcttagcgatgtaagcgcattagagttagaaaaatatgccgataccgccgtagcgcaggctgcttctccgctgctcgggcatgtgggttatgtgatcgtcgtcatcggcgctttactggcgacggctagtgccattaacgcgaacctgttcgccgtgtttaacatcatggacaacatgggcagcgaacgcgaactgccgaagctaatgaataaatccctgtggcggcagagtacctggggcaacattattgtcgtggtgttgattatgctgatgacggcggcactgaatttaggcagtctcgccagcgttgccagcgccacctttttgatttgctacctggcggtgtttgtggtggcgatccgcctgcgtcatgatattcacgccagcttgccgattcttatcgttggtacgttggtgatgttgttggtgatcgttggctttatctacagtctgtggtcccagggtagccgtgcgttgatatggattattggcagtctcttactcagccttattgtggcaatggtcatgaagcgcaataaaaccgtataacatctctctgtgcgcagtacttcctgtattattgtggtggcggtcgatattcgcactggcaaaaaaacgtgcttgaatatctgttgaaaccctttaacaaagcacaggaggcgttgcgcgaacgatgaacatcagcgatgtagcaaaaattaccggcctgaccagcaaagccattcgcttctatgaagagaaggggctggtgacgccgccgatgcgcagcgaaaacggttatcgcacctacacgcagcagcatctcaacgaactgaccttactgcgccaggcacggcaggtgggctttaacctggaagagagcggcgagctggtgaatctgtttaacgacccgcagcggcacagcgccgacgtcaaacggcgcacgctggagaaggtggcggagaacgaacgacacattgaggagctgcaatccatgcgcgaccagctgctggcactggcgaatgcctgccctggcgatgacagcgccgactgcccgattatcgaaaatctctccggctgctgtcatcatcgggcagggtgattaagagctgacggctcggatatgtagggttatcccttctatcgcaatgacttcaacatgcgtacctgcaccgagatcctcgctggcgctgacaggccaactactgtcaccgacgcgcatatgaccgcgcccgttgaccagcggagattccagcacaaaacgtcggccaatcagctgctgcccgcgctggtttaaatgactatcgctgtgcttttgttcgcgcacccgccggctcaaccatttccaccacagccaggcggcgagcagcgtcaggatggcaaacattaccccttgccactcccaacccagcggcaccagccagaccaccaggccggtaatcaccgctgccacgccgctccacaacaaataaccatttccgcccagcatctcggctgccagcagcaaaccgccgagactgagccagaaaatatgtggatgaacgaccattaactccatcatggctgagtccgtttgttggcgctgtctttcaccagctcggcaatcccggcaatgctccccatcaggctgctggcctctaatggcatcatcactactttgctgttactggaggaaccgatctgctgtaacgcttcggtgtatttctgcgctacgaagtagttcaccgcctgaatatcaccggaggcgatagcttcagacaccattttggtggcgcgggcttctgcttcggcggaacgttcacgcgcttcagcctgtaaaaacgcgctctgacgttcgccttccgctttcaggatttggctctgtttttcaccttcggctttgaggatttccgcctgacggatcccttccgcttcaagaatgtaagcgcgtttggtacgttccgctttcatctgcgcgttcatactagagataagctctgccggtgggcgcacgtcgcgaatttcaatacgggtgactttaatcccccacgggttggtggcttcatcgacaatacgcagcaggcgactgttgatgctgtcgcgctgagagagcatttcgtcaagttccatactacccagcacggtacggatgttagtcatggtcaggttgatgatcgccagctccagattgctgacttcataagccgcgcgcggcgcgtcaatcacctgaataaagcacacggcgtcgatggtaacgttggcgttatctttgctgataacttcctgggaagggatatcgagcacttgctccatcatattgatcttgcgaccaatgcgatccataaacggcaccaccagactgagccccggctgtaacgttttggtatagcgaccaaagcgttctactgtccactgatagccctgcggtacgattttgacacccgcgccgacaatgaccagcgcgacaaaaatgagaatcgggataaagataagcatcggaaaaacctcctgttgtaccgtccataatcagcaaaattgctgcttgattaaacaaattatacctgattactgaaagagagttcccccttattcctgcgaaggataaactgtttttagtaaaaatcagaaaaagggaacagcgatgcaggaaaatagtcctttgcttcagctacaaaacgtaggatatctggcgggtgatgcgaagattcttaataacatcaattttagcctgcgtgctggcgaatttaagttaattaccggtccttctggttgtggcaaaagtacgctgctaaaaatagttgctagtttgatcagcccaaccagcggaacgttactgtttgaaggtgaggatgtcagcacactaaagccagaaatctaccgccaacaagtctcttactgcgcccagacaccgacgctgtttggcgatacggtatacgataatctgatctttccctggcagatccgtaaccggcagcctgacccagccatttttctcgattttctcgaacgcttcgccttgccggacagcattttgacgaagaatatcgccgagctatctggtggtgaaaaacaacgcatcagtttgattcgtaacctgcaatttatgccgaaggttttattgctggatgaaataaccagtgcgctggatgaaagtaataaacataacgtcaatgagatgatccatcgttatgtgcgcgagcaaaatattgccgtgctgtgggtgacacacgataaagacgaaattaatcatgcggataaagtgattacactgcaaccgcatgccggagaaatgcaggaagcacgctatgaactcgcataactaaagaaatgcaggaagcacgctatgaacagccataatattactaacgaaagtttagcactggcattaatgctggtggtggtggcaatcttaattagccataaagaaaaactggcgctggagaaaaatattctctggagcgtcgggcgagcgataattcagctgattattgtcggctatgtgctgaagtatattttcagcgtggatgatgccagcctgacattattgatggtgttatttatctgctttaatgcggcgtggaacgcgcaaaaacgcagtaaatatattgctaaagcttttatcagtagctttattgccattacggtcggggcgggaattaccctggcggtgctgattctcagtgggagcattgaatttatcccgatgcaggtgatccctatcgccgggatgattgccggtaacgccatggtagcggtggggttgtgttacaacaatttagggcaacgggtcattagcgaacagcaacagattcaggagaaactgagtcttggtgcgacgccgaagcaggctagtgcgatattgattcgcgacagtattcgcgcggctttaattccgacggtcgatagtgcaaaaacggttggcttagtgagtttaccaggaatgatgtccgggctgatatttgccgggattgatccggtgaaggcgattaaatatcagattatggtgacctttatgctgctcagtaccgccagcttgagcaccattattgcctgctatttaacctatcgtaagttttataatagccgccaccagttggtggtgacgcaattgaagaagaaatgatgcgatgccggatgcgcagcatcgcatccggcgttgtggttcatgtgccgatcaacggaatatcaatacaacaatgcatacagctggcggcgatacttgctcgccagtgcatcacccgtacccagcgcagcgaggatctcctggaacgttttacgcgtctgaccgtctgcggcggtgagatctttacgcagatgcccgaacagcaactccagcgcctcttcattgcgcccaacctgatgcagttgcagcgccagttgcgtcgccagtgcggcatcttctggattctccgccacctgctgttgcaactgttgaatttccggcgtatcagccgcctgcttcagcagttcgatttgcgccaccagcccctggtagcgggtgtcctgatcctgcaacggaatggttttcagcaccgcttccgcatcttcagaacggttcagcgcaatcagcgtttctgccagcagcaggccgatctccccgttctgattgctcaactgccaggcgtctttcagcaatggcagggcatcggtgtaattgctttcctgcatcagttgcatcgcctgctgcgctttcagctcttcttcgcgcggcagcactttatccagcagggcgcggatcgcctcttccggttgcggcccctggaagccatctaccggttgcccgttctggaacagatacacggtcggaatcgcacgcagaccaaactgcgcggcaatcatctgctccgcgtcgcagtccagcttcgccagaataaattgcccgttgtactgcgccgcgaggctttccagaattggggttaactgcaaacagtgctggctacgttcagaccaaaaatagaacagcaccggagtggtcatgctctgttcaagaacctgttgcaggttagattcgttaatgttgacaatattttctacggacatggagtcgctctctgttgtcgatattttctttgacatgggggcttaagcgcgcgcttcaactcacccctgcaatattttgtccatcacgcgccccggcagcaggcgcttaagcaccattaccgcccaggtcaccagcgtcaccggatagcgcatcttcggcttctcgctaataaaagcatggcgtactttgtccaccaccgcttccggtcccaacgtaaagcgggcggcgatgccgggattttcgactggtttatcactttgcgtctggttgacgttgtcggtgaagcgagtacgaatgggaccgggttcgatcaggctgactttaattccgctgtggcgcagctccatgcgcagtgcatcactccacgcctccagcgcatatttactggccgcgtaagcgccacgacccggcgtggagattaatcccatcacgctacttgtcatcacaatacgcccttcaccgtgcggtaacatcgcgggtaacaggcgcatggtgagctggtgtgcgccgaaaaagttggcggaaaactgctgttccatctgcgcacggctgatggtggaaagggggccatacatgccgaatccggcattgttaaagatcccatacagacaattatcggtcagggcgatcacctcgtcggctgcgcgatcaacactttctggactatccagatcgatcaacacgccggtaaatcccatgctgttcatgcgctcaacatcatccggtttccggcaacctgccagcacatgaaaaccctggcgttttaattcgagcgcgctttccaggccaattccactggaacatccggtaattaagacgcttttttgcataactttacctgtcaggatctccgttgctttatgagtcatgatttactaaaggctgcaacttatttaactgtcatgatttactaaaggctgcaactgcttcgccatccagtcggcaataaacggctgggcgtcgcggttgggatgaataccgtcatcctgcatccattgtggcttgaggtagacctcttccataaaaaagggcagcagcggaacatcaaactctttggcgagtttggggtaaatggcgctaaaggcttcattataacggcgaccatagtttgcaggcagacgtatttgcattaacaatggttcagcgttggcggctttgacatcctgcaaaatctggcgcagcgtttgctcggtttgctgtggctgaaaaccacgcaaaccgtcattgccgcccagttcaaccagcacccaacgcggctgatgctgtttcagcagagccggaaggcgcgccagtccttgttggctggtgtcgccgctgatgctggcattaactacgctcgttttactctgccacttatcattcaacaaggcaggccaggccgcgctggcagacattcgatacccggcgctcaggctatcacccagaatcaataacgtgtccgctgcggcggcacggaaggttaacaggaccaggaacaggaagggcaaatgccagcggaaaacattgttgaagttcatcatcttaagaagtccgtcggtcagggggagcatgaactctccatcctcaccggagttgagctggttgtcaaacgtggcgagaccatcgcactggtgggcgagagcggaagcggtaagagtaccttgctggcgatcctcgccgggcttgatgacggcagcagtggcgaagtgagtctggtgggacaaccgctacataatatggacgaagaagcgcgggcaaagttgcgcgcgaagcacgtcggctttgtttttcagagttttatgttaattcctacccttaacgcgctggaaaacgtcgagcttccggctctgctgcgcggtgagagtagcgcggaaagtcgtaacggggcgaaagcgttgctcgaacagttagggctgggtaaacgtctggatcatcttccggcacagctttccggcggtgaacagcaacgagtggcgctggcacgagcctttaatggtcgacctgatgtgctgtttgccgacgaacccaccggcaaccttgaccgccagacgggcgataaaattgccgacctgctgttttccctcaaccgtgaacatggcaccacgttgattatggtgacccacgacctgcaactggcggcacgctgcgaccgctgcttacggctggtgaacgggcagttgcaggaggaagcatgattgcacgttggttctggcgcgaatggcgtagcccgagcctattaattgtctggctggcgctaagcctggcggtggcctgcgtgctggcgctgggcaatatcagcgatcgcatggagaagggcttaagccagcaaagccgtgagtttatggcgggcgatcgggcgttgcgcagtagtcgcgaagtgccgcaagcgtggctggaggaagcgcaaaagcgcggcctgaaagtcggcaagcagctgactttcgccacaatgacctttgcaggcgacacaccgcagctggcgaacgtcaaagcggtggatgatatctacccgatgtatggcgatctgcaaactaatccccctggcctgaaaccgcaggcgggcagcgtattgctggccccacgcctgatggcactgcttaacctgaaaacgggcgacaccattgacgtgggcgatgccaccttgcggattgccggagaagtgattcaggaaccggattccggttttaaccccttccagatggctccgcgtctgatgatgaatctggcggatgtcgataaaaccggagccgtgcagccggggagtcgggtcacctggcgttataaattcggcggcaacgagaaccagctcgacggctatgagaaatggttgttacctcagcttaaacccgaacaacgctggtacggtctggaacaggacgaaggcgcgctggggcgaagcatggaacgcagccaacagttcctgctgcttagcgcgcttctgaccttgctgctggcagtggcagcggtggcggtagcgatgaatcattactgtcgcagtcgctacgatctggtggcgatcctcaaaacgctgggggcagggcgagcgcaactgcgtaagctaatcgtcggtcagtggttgatggtgctgacgcttagtgccgttaccggtggggccataggcctgttgttcgaaaacgtgttgatggtgctgctcaagcccgttctgcctgctgcactaccgccagccagcctctggccgtggctgtgggcgcttggcaccatgacggtcatcagcctgctggtggggctacgaccatatcgcttgttgctggcaacgcagcctttacgcgtattacgtaatgatgtggtagcgaacgtctggccgctgaagttttatctgccgattgtcagtgtggtggttgtgctgctgctcgccggattaatgggtggcagcatgctgctttgggcggtgctggcgggcgcggtagtactggctttgctgtgcggtgtgctgggctggatgctgctgaatgtacttcgccgcatgacgctgaaaagcctgcctctgcgcctggcggttagccgcctgttacgtcagccgtggagtacgttaagtcagcttagcgcatttagcctctcctttatgctgctggcactgctgctggtgttgcgtggcgatctgctcgaccgctggcagcagcagctacctccagaaagcccgaactactttttaattaacatcgccacagaacaggtagcaccgctaaaagcgttcctcgcggaacatcagatagtcccggaaagcttttatccggtggtgcgggcgcggctgacggcgattaacgataagccgacagaaggtaatgaagatgaggcgcttaaccgcgaactcaatcttacctggcaaaatacgcggcccgatcataatccgattgtcgccggtaactggccgccaaaagccgatgaagtgagcatggaagaggggctggcgaaacgcttaaacgttgccctcggtgataccgtgacttttatgggcgatacccaggagttccgcgctaaagtgaccagcctgcgcaaagtggactgggaaagtctgcggcctaatttctattttattttccctgaaggggcattagacgggcaaccgcagagctggcttaccagtttccgctgggagaatggcaacggcatgttgacacaactcaaccgccagttcccgaccattagcctgttagatattggcgcgattttaaaacaggtcggtcaggtgctggagcaggtaagtcgggcgctggaagtgatggtggtactggtcaccgcctgcggtatgttgctgttgctggcacaggtgcaggtgggaatgcgtcagcgtcatcaggagctggtggtgtggcgcacactcggtgcggggaaaaaactgctgcgtaccacgttgtggtgtgagttcgccatgcttgggtttgtttccggcctggtggccgcaattggtgcggaaacggcgctggcagtgttgcaggcgaaagtgtttgattttccgtgggagccagactggcgattgtggattgttctgccgtgcagcggagcgctgctgctgagccttttcggcggctggctgggtgcgcgactggttaagggtaaggcgctgttcaggcagtttgcggggtgatgagagtccctcattaccgcgccttaacccattccgccacttccgcccactcaccgcgaaagacaactttttccgcttttttctcaagctgatagcgatacatcgggtcgtaatattcttcaagtaacggcaccagccaggccagatgaccgtcggtgctgccggtggtgagttgcgttgtcagtgctgcatccagccttgcagccagttcgttatagcgctgtagccccagccgacgcttaatcgcgctaagtccgtgatgcaggtattcgcaatactcctgccagccctgttcgtcgccgtacgcgtgggtaaaatcatgatgcatacgcaagaaatactcttcgttcaggcgctcaagacggatctcaaacggatcttctaccaccgcaatcgccgcctgagtcattcgctcgcgcaggcattccggcaggtgattgctaccgatcatccggctttcgtcttccagcacccacaggcgcaaattctgacgggcgtcggtttttagcatttcggcagccagcaggttttcaaaactcgcctggctaagttgtggttgtaacgtgcgaccaaacgcgctaccgcgatgacgcgccaacccttccagatcaacaccgttcggctgttgctgcactaacagcgttttaccgctgccggtacaaccgccaatcagcactatcggtttttgtgccagttcaatagtcgcctgaatcgcggtctggcgcagtgccttataaccgccttccaccagcggataatcaatccccgctgcatgcaaccagctttgcacaatatgactgcgctgaccgccacgggcgcagcagagaataccttgcggattttgcaggcacgctgcccgccaggcgtccatgcgctgctgacgaatttcacccgccaccagtttatgtcccagcgccagcgctgcgtcactgccttgctgtttatagcaggtgccaacggcggcgcgttcatcgttattcattaacggcagattgatagcggcgggcattgcgccgtgctcaaactcgataggggcgcgaacatcaataatgggcgtatcagcaatcagcagggcacgatagtcctgttccgtgtgtctctcttgcatagttaaaagtgaacctcaaatcagcttgcgcgctattttacgcgccaacgcgcaaggaaacttgatttttaactgcgtgggttgccgaaaatttctaaaaatccgctgatttccggcctgcgctgggtaaacaaggtcacaatatcttctaccgctttgccgctgccaaatttgcgccatgccagactcaatgggctaggagggcgcatcgttgggattacccggctgaccagttgttgattatcgatcatactctggcaaaggctttttggcaaaaaaccaatgccaacgcccgccagatgggcggcgattttcgtttccatatcgggaacaataatctctttttgccctggcaatcgccaggcgacgcgtttggttaaggtgcgggcgctgtcttcaatattgaccgccggaaagcgccgcaactgcgcttctgttagcggctcttcaacgttcgccagcggatgatccgccgccatgacaaagcgccattgcacgcttcctaagggatcaagactaaaggtatttgccagcgcctcagttcccgtgacgccgatagccaggctaaaaccttcgtacaataggctgtcccagacgcccatatagatttgtcgggagatgtgaaactgggtaaaggggtaacgctcattcagccacgccagcaactgggcgacggcctgggggttatagagcaggttgttgatgacaatattcacctggcgttccacgccatcattcacctgttgcagctcgcttggcatactttccagccagctcagccagtctctggcctgggaaagtagatgctcgccagccgctgtcaacgtcacgctgcgagtcgtacggaaaaacagcgctactccggtattctcttccagaagtttaatgcgataactgatcgtcgccgtggttttacataatcgttctgccgctttactaaaacttcctgtttcagcaaccgcaatgaaagtccgcaaggtttctggatcgaacatcttcaggtatccccttttaaatccgcaagttgcgtgattttcttatcctctgatttatcagtatttttacatgataaccctgttcaatttgtggactaaatctagttttggaaaaatattccaacttttgtattgatgttgttctcttaaggttttagattgcctgttattgaaaccaagctgaccggtcggcggtggttgaacggaattatgttacaaggacaaaaagatgaaacttcaggtattaccgttaagtcaggaagcctttagtgcttatggcgacgtaatcgaaacgcagcaacgggattttttccatattaacaatggcctggtggagcgttaccacgatttggcgctggttgagattcttgagcaagactgtacgcttatcagcattaaccgcgcgcaaccggcgaatctgccgctgaccattcacgaactcgaacgtcatccgctgggtactcaggcctttatcccgatgaaaggtgaggtgtttgtggtggtcgtggcgttaggtgacgacaaaccagacctgagtacgctgcgggcgtttatcaccaacggcgaacagggagtgaattaccatcgtaacgtctggcatcacccacttttcgcctggcagcgcgtcaccgattttctgaccatcgatcgcggcggcagtgacaactgtgatgttgaaagtattcctgaacaggaactctgttttgcgtgacgcctgcaaccgacttgcataagataaactaattgttcattgtttatgctcacttgtaggtcggagttaacgtaggtatgacggaagttagacggcgcggcaggccaggacaggcggagcctgtggcacagaagggcgcacaggcgttagagcggggaattgcgattctgcaatatttggaaaaaagtgggggaagtagcagcgttagcgatatttctctcaatctggatttgccgctctccacgacctttcgcttgctgaaggttttacaggcagcggattttgtctatcaggacagtcaattaggctggtggcatataggattaggtgtctttaacgtcggtgcggcgtacatccataaccgcgatgtcctctccgtcgccgggccgtttatgcgccgcctgatgttactttccggcgaaacggtcaatgtcgcgatccgtaacggcaatgaagcggtattaattggtcagttagagtgtaaaagcatggtcaggatgtgtgcgccactgggcagtcgtctgccactgcatgcttccggtgcgggcaaagcgctgctttatccgctggcggaagaggagttgatgagcatcattctgcaaaccggtttgcagcagtttacgccaactacgcttgtggatatgcccaccttgctgaaggacctggaacaagcgcgtgaactgggctataccgtagataaagaagagcatgttgtaggtctgaattgcatagctagtgcaatttacgatgatgtcggtagtgttgttgccgctatctccatctccgggcctagtagtagactgacagaagatcgttttgtcagtcagggtgagctggtcagagacaccgcccgcgatatcagcacggcgttgggactgaaagcacatccataatgtctgtcgcatcccgctctgcggagcgggtttttttgacaaaatttgaaagttggaaaaattttccaataaatagaggtaggaataaaatggcaaaaatgagagccgttgacgcggcaatgtatgtgctggagaaagaaggtatcactaccgccttcggtgttccgggagctgcaatcaatccgttctacagtgcgatgcgtaagcacggcggtattcgtcacattctggcgcgtcatgtggaaggtgctagccacatggcggaaggttatacccgcgcaacggcagggaatatcggcgtatgtctggggacttccggtcctgcgggcacggacatgatcaccgcgctctattccgcttctgctgattccattcctattctgtgcattaccggccaggcaccgcgcgcccgtctgcataaagaagattttcaggccgtagatattgaagcaattgctaaaccggtcagcaaaatggcggttacagttcgtgaagcggcgctggtgcctcgcgtgctgcaacaggcatttcacctgatgcgttctggtcgtccgggtccggtactggtggatttaccgttcgacgttcaggttgcggaaatcgagtttgatcctgacatgtacgaaccgctgccggtctacaaacctgctgccagccgtatgcagatcgaaaaagctgtagaaatgttaatccaggccgaacgtccggtgattgttgccgggggcggggtaattaatgctgacgcagctgcactgttacaacagtttgctgaactgaccagcgttccggtgatcccaacgctaatgggctggggctgtatcccggacgatcatgaactgatggccgggatggtgggtctgcaaaccgcgcatcgttacggtaacgcaacgctgctggcgtctgacatggtgtttggtatcggtaaccgttttgctaaccgtcataccggcagcgtagagaaatacaccgaagggcgcaaaatcgttcatattgatattgagccgacgcaaattggtcgcgtgctgtgtccggatctcggtattgtctctgatgctaaagcggcgctgacactgctggttgaagtggcgcaggagatgcaaaaagcgggtcgtctgccgtgtcgtaaagaatgggtcgccgactgccagcagcgtaaacgcactttgctgcgcaaaacccacttcgacaacgtgccggtgaaaccgcagcgcgtgtatgaagagatgaacaaagcctttggtcgcgatgtttgttatgtcaccaccattggtctgagtcaaatcgctgcggcacaaatgctgcatgtctttaaagaccgccactggatcaactgtggtcaggctggtccgttaggctggacgattccggctgcgctaggggtttgtgccgctgatccgaaacgcaatgtggtggcgatttctggcgactttgacttccagttcctgattgaagagttagctgttggcgcgcagttcaacattccgtacatccatgtgctggtcaacaacgcttatctggggctgattcgtcagagtcaacgcgcttttgacatggactactgcgtgcaactcgctttcgagaatatcaactccagtgaagtgaatggctacggtgttgaccacgtaaaagtagcggaaggtttaggttgtaaagctattcgggtcttcaaaccggaagatattgcgccagcctttgaacaggcgaaagccttaatggcgcaatatcgggtaccggtagtcgtggaagttattctcgagcgtgtgaccaatattagcatgggcagcgaactggataacgtcatggaatttgaagatatcgccgataacgcagcggacgcaccgactgaaacctgcttcatgcactatgaataagggagataaataatgttacgtttctctgctaatttaagcatgttatttggagaatatgattttctcgcccgttttgagaaagctgcgcagtgtggttttcgcggcgttgaatttatgtttccttatgactacgacattgaagaattaaaacatgtgctggcgagtaataaactcgaacatacgctgcacaatttaccggcgggtgactgggcggcgggggagcgcggtattgcctgtattcctggccgtgaagaagagtttcgggatggcgtagcagcagcgattcgttatgcccgtgcgctgggtaataaaaaaattaactgtctggtcggtaaaacgccggctggtttcagcagtgaacagattcacgcaacgcttgtagaaaacctgcgttatgccgcgaatatgctgatgaaagaagatattttattactgattgaacctattaaccattttgatattcctggtttccatctcaccggaactcggcaggcgctgaaattgattgatgatgttggttgctgcaatttgaaaattcagtatgacatttatcatatgcagcggatggaaggtgaattaaccaacaccatgactcagtgggctgataaaattggtcacctgcaaattgccgataatccgcatcgcggcgaaccgggaaccggagaaattaattatgattatctctttaaggtaatcgaaaattctgactacaacggttgggttgggtgtgaatataaaccccaaaccaccacggaagccggtttacgctggatggatccgtaccgttaaaacgtaacgctattcagacaatgcttttttaggccgctaagttggcaggggatcgtgttgtctgaattcaggaaaagcgaaatttaaaagaggttaattatgaaactgggatttattggcttaggcattatgggtacaccgatggccattaatctggcgcgtgccggtcatcaattacatgtcacgaccattggaccggttgctgatgaattactgagtctgggtgccgtcagtgttgaaactgctcgccaggtaacggaagcaagcgacatcatttttattatggtgccggacacacctcaggttgaagaagttctgttcggtgaaaatggttgtaccaaagccagcctgaagggcaaaaccattgttgatatgagctccatttccccgattgaaactaagcgtttcgctcgtcaggtgaatgaactgggcggcgattatctcgatgcgccagtctccggcggtgaaatcggtgcgcgtgaagggacgttgagcattatggttggcggtgatgaagcggtatttgaacgtgttaaaccgctgtttgaactgctcggtaaaaatatcaccctcgtgggcggtaacggcgatggtcaaacctgcaaagtggcaaatcagattatcgtggcgctcaatattgaagcggtttctgaagccctgctatttgctagtaaagccggtgcggacccggtacgtgtgcgccaggcgctgatgggcggctttgcttccagtcgtattctggaagttcatggcgagcgtatgattaaacgcacctttaatccgggcttcaaaatcgctctgcaccagaaagatctcaacctggcactgcaaagtgcgaaagcacttgcgctgaacctgccaaacactgcgacctgccaggagttatttaatacctgtgcggcaaacggtggcagccagttggatcactctgcgttagtgcaggcgctggaattaatggctaaccataaactggcctgatacccgcaataaaaatggccgatatcagaaaatgaatcggccagcaatattaaaaaagaaagcagccaaagatgttgctagtgtattaaaaataatatttttattttatttgttcctcatagctagattaaaacaacgttatagcatacgtgaaattaagagggatttatggaacatcagagaaaactattccagcaacgcggctatagcgaagatctattgccgaaaacgcaaagccagcggacctggaaaacatttaactattttaccttatggatgggtagcgttcataacgttcccaattatgtgatggtcggcggcttttttattctcggcttgtctacctttagtattatgctggcaattatcctcagcgcctttttcattgccgcggtaatggtattaaacggtgctgcgggcagtaaatacggtgtgccttttgccatgatcctgcgtgcttcttacggtgtacgtggtgcactgtttcccggattattaaggggcggaattgccgccatcatgtggtttggtttgcaatgttacgcggggagtctggcctgcttgattctgattggcaaaatctggccgggatttttaactctcggtggtgatttcactctgttaggcctttctctaccgggcttaattactttcttaatcttctggctggtcaacgttggtataggttttggcggtggcaaagttttaaataaattcactgccattcttaacccgtgcatctatatcgttttcggcggtatggcgatttgggcgattagtctggtcgggatcggtccaatctttgactacattccgagcggtattcagaaagcagaaaacggtggcttcctgttcctggtggtgattaacgcggtagttgcggtctgggcggcaccggcggtgagcgcatccgactttacgcaaaacgcccacagctttcgtgagcaggcgctggggcaaacgctgggtttagttgtggcctatattctgtttgcggtcgccggggtatgtattattgccggagccagtattcactacggcgctgatacctggaacgtgctggatattgttcagcgttgggacagcctgttcgccagcttctttgcggtactggttattctgatgacaactatctccactaacgcgaccggtaatattattccagccggttatcagattgccgccattgcaccgacaaaactgacctataaaaacggcgtactgattgccagtattatcagcttgctgatctgcccgtggaaattaatggaaaatcaggacagcatttatcttttcctcgatattatcggcggaatgcttggtccggtaattggtgtcatgatggcgcattattttgtggtgatgcgcggacaaattaatcttgatgaactgtataccgcacctggcgattataaatattacgataacggttttaacctcactgcgtttagtgtaactctggtggccgttattttatctcttggcggtaagtttattcactttatggaaccgttaagccgtgttagttggtttgtcggcgtcatcgtcgcctttgcggcctacgccttattaaagaaacgtacaacagcagaaaaaacaggagagcaaaaaaccataggttaattaatcccgatattgaacattgagttaaaaaccaatctgtattttacaaggagtttgttatgtcttttgatttaatcattaaaaacggcaccgttattttagaaaacgaagctcgcgttgtagatatcgccgttaaaggcggaaaaattgctgctatcggtcaggatctgggcgatgcaaaagaagttatggatgcgtctggtctggtggttagcccgggcatggttgatgcgcacacccatatttctgaaccgggtcgtagccactgggaaggttatgaaaccggtactcgcgcagcggcaaaaggtggtatcaccaccatgatcgaaatgccgctcaaccagctgcctgcaacggttgaccgcgctagtattgaactgaagttcgatgccgctaaaggcaagctgactattgatgcggcacaactcggtggcctggtgtcttacaacatcgaccgtctgcatgagctggatgaagtgggcgttgtcggcttcaaatgcttcgttgcgacctgtggcgatcgcggtatcgacaacgacttccgtgatgtaaacgactggcagttcttcaaaggtgcgcagaagctgggcgaactgggtcagccggtgctggtgcactgcgaaaacgcgctgatttgtgacgaactgggcgaagaagcgaagcgtgaaggtcgcgtaaccgctcatgactatgtggctagccgtccggtatttaccgaagtggaagcaattcgccgcgtactgtatctggcgaaagttgctggttgccgtctgcacgtttgccacgtcagcagcccggaaggtgttgaggaagtgactcgtgcacgtcaggaaggtcaggacgttacttgtgaatcctgcccgcattactttgtactggataccgatcagttcgaagaaatcggtactctggcgaagtgtagtccgccgatccgcgatctggaaaaccagaaaggcatgtgggaaaaactgtttaacggtgaaatcgactgcctggtttccgaccactctccatgcccgccggaaatgaaagccggtaacatcatgaaagcatggggcggtatcgccggtctgcaaagctgcatggacgtgatgttcgatgaagcggtacagaaacgcggtatgtctctgccaatgttcggcaaattaatggcgactaacgcagcagatattttcggtctgcagcaaaaaggccgtatcgccccaggaaaagatgccgacttcgtcttcattcagccgaatagcagctatgttcttaccaatgacgatctggaatatcgccacaaagtcagcccgtatgttggccgtaccattggcgcgcgtatcacgaaaaccatcttacgtggtgatgtgatttacgacattgaacagggcttccctgttgcgccgaaaggtcaatttatccttaaacatcagcagtaatctggcccctgcaatgcccgtccttgcggcgggcattctccggttaaggtgtgtttatgttcaattttgcagtcagccgcgaaagcctgttaagtggatttcagtggtttttctttattttttgcaacacggttgtggttcctcctacgctactttctgcttttcagttgccgcaaagtagcctgcttacgctcacgcaatatgcttttcttgctaccgcactggcctgcttcgctcaggcgttttgcggtcatcgtcgcgctattatggaagggccaggtggcctgtggtggggaaccatccttactatcacccttggtgaagcaagccgcgggacaccgatcaacgatatcgccaccagcctggcagtggggattgcactctccggcgtgctgacgatgttgattggttttagcggattaggccatcgcctggcacggttatttacgccgagcgtgatggtcttgtttatgttgatgctgggcgcgcagctgaccactatctttttcaaaggtatgctcgggctgccgtttggcatagccgacccgaattttaaaattcagttaccgccgttcgcgctcagcgtggcggtgatgtgcctggtactggcgatgattatcttcctgccgcaacgttttgcccgttatggcctgctggtcggcaccataaccggctggttgttgtggtacttttgctttccttctagccacagcctctccggtgagttgcactggcagtggttcccgctcggcagtggcggtgctttgagcccgggaattattctgacggcggtgattacaggtctggtaaatatcagcaatacctacggtgcgattcggggcacggatgttttttatccgcagcagggcgcagggaatacgcgttatcgtcgtagctttgtggcgaccggatttatgacgctgataaccgtaccgctggcggtaattccatttagtccgtttgttagttccattggtttattaacccagactggcgattacacgcggcgtagctttatttatggcagcgttatttgcctgctggtggcgctggttcctgcactcacgcgactgttttgcagtatccctttacccgtgagtagtgcggtcatgctggtttcttatctgcctttactcttttccgcgctggtgtttagccagcaaataacgtttaccgctcgcaatatttatcgactcgcattgccgttatttgtcggcatatttttaatggcattaccgcctgtgtatctgcaagaccttccattaacgcttcgtcctctgctcagtaacggcttattggtcgggattttactggctgttcttatggataaccttattccgtgggaacgcatcgaataatttgttgaaaaaggattgataatgaagattgtcattgcgccagactcttttaaagagagcttaagtgcagaaaaatgttgtcaggcaattaaagccgggtttagcaccctctttcccgatgcgaactatatctgtttgccgatagcggatggcggcgaagggacggtggatgcgatggtcgccgcgacgggcggcaacatcgtgacgcttgaagtctgcgggccgatgggcgaaaaagtgaatgctttttatggccttaccggcgacgggaaaacggcggtgattgagatggcggcagcaagtggcctgatgctggtcgcgcctgaaaagcgtaatccgttgctggcctccagttttggtacgggggagttaattcgtcatgcgctggataacgacattcgccatattattctcggcattggcggcagtgcgacggtcgacggcggtatgggcatggcgcaggcgctcggtgtgcgtttccttgatgccgacggtcaggcgctggcggcaaacggtggtaatttagcgcgcgtggcaagcattgagatggatgaatgcgatccgcgtctggcgaattgccatattgaagtagcatgtgacgttgataacccgctggtaggggcacgcggcgcggcggcggtgtttggcccgcaaaaaggggcaacgccggagatggtcgaagaacttgaacaggggctgcaaaattacgcccgtgttttacaacagcaaactgaaattaatgtctgccagatggcgggcggcggcgctgcgggcggtatgggtattgcggcggcggtatttctcaatgcggatattaaaccgggcattgaaattgtgttgaatgcggtcaatcttgcgcaggcagtgcagggcgcagcactggtgattaccggggaagggcgcatcgacagccaaacggcaggcggtaaagcgccgctgggtgtggcgagcgtggcgaagcagtttaatgtaccggtgattgggattgctggcgtattgggtgatggcgtggaagtggtgcaccagtacggcattgacgcggtattcagcattttgcctcgtctggcacctttagccgaagtgctcgccagcggtgaaaccaatctcttcaacagcgcgcgaaatattgcctgcgccattaaaataggtcagggaattaaaaactaacccttacctttaaagcggatgcgatttatatcgcataagagtgcagtactcatgccggatgcggcatgagtaccatatccttcctgaaaatcgcgcaaattctatatattgcagagatcatgtaggcctgataagcgaagcgcatcaggcaatgttacaaaaaaagccacggtataaaccgtggcaaaatccaacatagctaaaaataatcaggcgagtggtatgacttaaatctctacgtcgcggttacaatctttgctgtaaatatagctgaacgcttcaccacgccctacaccataaccagcctgtaaagaataagcgcccataaagatgtaatcgccttttttcaccgggatccagttattgtcgaggttataaaccccctgaccggaaagaatataggcaccgtgttcctgaacgtgtgtttcgatataaccgtggctggcacctggtgcaaaagagaggatatgcatgttcatatcaaaacctaactctttgggcagaaaatccagcagaataacatcgtccatgccttcataatgaatgcgttccagttcgctggcattgccagaaaccagccacggtgcatagccttctaccggaacatagcggcgcttatataaaaagatttggctgtcttcggcctgggcgttaacaaacgtcattaaggagcctggcgggcaataaagatagccaccttcgcttaaggcaaatgttttgccttcggctttggcagtgatatttccagagatcacatacaggaacgtttcaatgccttcgccaccgaagccctgttggttgccaccgttttgatgcagtgtgaccagataatcaacaaaagaggcacccagctttggcgtggagaggattgtcgcgtcacaattttcaaagcccggaataatattttttaccagaccatccggggttaacagtgcgaaattaccgtgtttaacaatcgcacggttagccagtaaatcttcgcggtaaccggtgacgttatttaaatatcccatttatgactccttatttctgccaggcaagttgataaagcatgagtgccaacgttttgaccccttcggcaaggtcggtaatattggtgcgttccgccgggttatggctgatcccgttgatgctggggataaaaatcatgcaggttggtacgcgaggcgcgaaaatttgcgcgtcgtgcccggcaccactgtgcatcacccggtaattcagtttttctctttcacacaattctgtcagggtggcgaccagctccttattcatcggcacgggttcttcgtccatccataaatcgatatcaataccaatgtccatttcatcgcaaatcgcccgcatgtcgttttctaactgttgggtgaaatcgcgcagcacggcagcgtcggtatgacgacaatcaatggtgaacgtggttttacccggcaccacatttaccgtattcgggcgcggctctactttgccaaaggtcagaaccagcggatcgcccatccttttcgctttttcgacgctctgatggcaaatgcgactgaaagcgtaaactgtatcacgacgataacccatcggcgtggtgcctgcatggttactttcgccgttcagcgttaccgtataacgacgctgcccgacaattgcattcaccacgccaatactttgcccattactttccagcacacagccctgttcaatatgcagttcaacaaaggctttaatatcctgacgcggagttagtggggcgttcggaagagtaaatccgcaagccttcatcgcatcgacaaaactatttcctttggcatcacagatattccgcacgtcgtcaggattcgccagcccaaaaatatttttactgccccagaagacatacgggaagcggctgccttcttcttctgccatcgccaccacttcgaccgtacgtagcggcgcgccgtattgcgttttcagccagtcaattgccagccacgccgccagcgcgccgaattgcccgtcaaggttaccgccgttaaccacggtatcgatatggctaccgctcagaaccacttcctgtggatattcggtgccattcaggcgaccgtataaattccccacttcatcgaaacgtgtttccagcccgcttgctgccattctttttttaaattgctgctgggtttccagccattccgggctataaagtaaacgggtcatcccacccgctgggtcagcgccaaaagaggaaagccagggcagcgtttcttctatagcttgacggaaatgtgtaatcataagaaagtcctgtctcaataattattgcgcaaagggatttttcgtttcgtaactcgtgttataaagcgcgtcggaaattaaatactggtaaatatcatcaacaatttcgatgccttcgacggcggctttgcgttgtttaatatcctgatcctgtccgggataataaacctgattaaaaccgggcgcgggggtaatggcatttaattcgcgcatggtctggctaagatgttgacggaataattcgctggaggagaaaaagttcggattaataactatatgtaattgccccaaattacgccctgcgtgtaaatcgtcatacatgctactaacctgtcgcccgaacggtaagccgagtaagacgccactgaggacgtcaatcatcatcatcaggccatacccttttggcccggcggcggggagcagagcatgtaccgcgaacggatcggttgttggtacaccgtttttatcgaccgcccaggtatccgggatagacatattacggctgcgggcgtcgagcacttttccccatgcctgtacggtagtcgccatatcaaaggtaaggatctcgtcgccttctcccggcgcggcaaaggccagggggttagtaccgtagtaaatttccgcgccgccaaacggcaccaccattggatcggactggcacatgctaatgccaatgaatccggcgcgggctgcctgctgcacaaaataagagattgcgccgctgtgacccatccggctgataccgaccaccgcaacgccattttgctgggcggttttgatggcatgttccatacccattttcgccgcgacctgtccggcggcattgtcggcatgtaaaattgcgctgcacggcccggtttcctcaagacgaaactccggttcgcggttggtgccgcctttactaatgcgttccgcgtagtattccacgcgcaccgcgccatgagagtggatccctctggcatcggcgtaaaccaatacttcagccacggttgcagcgtgctcacgttttaacccagcctggcagagtttattctcaattagctggtggagtgtttcccgactgattttcatctgtcttcctttttaacgacggtgtgaagcatgactgcaattaacatacagggaaaatatctggattatgtgatccagacaggcaaaaaaatatagttagaatttatttgataatccgctcacttttaacctgatttttaaaacaacaacgcttattaaaaaataatgagtaatagcctggtggttatttgaattcttttgttaataattcctgtgtgatattcatcaccttatttactcgttgtcatcgataccgtaatcgccacattaacactgctcgtgcaattgccatgggtgcaatttttaaggagttgttatgatccacgcctttattaaaaaagggtgttttcaggatagcgtcagtttaatgattattagtcgaaaactcagcgaaagtgaaaatgttgatgatgtttccgtaatgatgggtacgcccgccaataaagcgttattagataccacaggtttctggcatgacgattttaataacgccacgccgaacgatatttgcgtggcaattcgtagcgaagcggcggatgcggggatcgcgcaggcgattatgcagcagcttgaagaggcgctaaaacaactggcgcaggggagtggcagcagccaggcgttgacgcaggtgcgtcgctgggacagtgcctgtcagaaattacccgatgccaatctggcgctgattagtgtggctggcgagtatgcggcggagctggcaaaccaggcgctggatcgcaacctcaacgtgatgatgttctccgataacgtcacgctggaagatgaaatccaacttaaaacccgcgcgcgggaaaaaggcttgctggtgatggggccggactgcggtacgagcatgattgccggcacaccgctggcttttgctaacgtgatgccggaaggcaatattggcgtcattggcgcttccggtaccgggattcaggagctgtgtagccagattgcgctggcaggggagggaattactcacgcgattggccttggcgggcgcgacctcagccgtgaagtgggcggcatcagtgcgctaacagcgctggaaatgctcagtgcagacgagaaaagcgaagtgctggcatttgttagtaaaccacctgccgaagctgtgcgtctgaaaattgttaatgccatgaaagcaaccggcaaaccgacggtggcgctgtttttaggttataccccggcggtggcccgcgacgagaatgtctggtttgcctccagcctggatgaggccgcacgcctggcttgcctgcttagtcgcgtcacggcgcgacgtaacgcaatagcgcctgtcagcagcggatttatttgcggtttgtataccggcggtacgctggctgccgaagcggcgggattacttgccggacaccttggcgtggaagccgacgatacccatcaacatggcatgatgctggacgccgatagccaccagattattgacctcggcgatgatttctacaccgtcgggcgtccccatccgatgatcgacccaaccttacgcaaccagttaattgccgatctcggcgctaaaccgcaagtgcgcgtgttgctgcttgatgtcgtgattggcttcggtgcgaccgccgatcctgccgccagcctggtgagcgcctggcaaaaagcctgtgccgcgcgtttagataatcaaccactgtatgccattgccacggtgacaggcactgaacgtgacccgcaatgccgcagccagcaaatcgccacgctggaagatgcggggattgcggtcgtgagtagcctaccggaagccaccttgctggcggcagcgttaattcatccgctcagccctgccgcacagcaacacacaccgagtttactggaaaacgtcgccgtgattaacatcggattacgcagctttgcgctggagctacaaagcgccagcaaaccggttgtgcattaccaatggagcccagtcgccggtggcaataaaaaactggctcgtttattagaacgtttgcaataaggggttcccatgtttacatcagtggcgcaagccaatgctgcggttatcgaacaaattcgtcgcgctcgtccacactggctggatgtgcaaccggcttcttcacttatcagcgaactaaacgagggcaaaacactgcttcacgccgggccgccaatgcgctggcaggagatgaccggacccatgaaaggggcgtgcgtgggcgcatgtctgttcgaaggttgggcgaaagatgaagcgcaggcgctggcaatactggagcagggggaagtgaacttcattccttgtcaccatgtgaatgccgtcgggccaatgggcggtattacttctgccagtatgccgatgctggtggttgagaacgtgaccgacggcaaccgggcgtactgcaacctcaacgaaggtatcggcaaagtgatgcgttttggcgcttacggcgaagatgtcctgactcgccatcgctggatgcgcgatgtgttaatgccagtattaagcgcggcgctggggcgcatggagcgcggtatcgatctcacggcgatgatggcgcagggcattacgatgggcgatgagttccatcaacgcaatattgcttcctctgcactgttaatgcgtgcgctggccccacaaattgctcgcctcgatcatgataaacagcacatcgccgaagtgatggatttcctcagcgtgaccgatcagttcttcctcaacctcgcgatggcttactgcaaggcggcgatggatgctggcgcgatgatccgcgcaggcagcatcgtcacggcaatgacccgcaacggcaatatgttcgggattcgggtaagcgggctgggcgaacgctggtttactgcgcctgtaaacactccgcaaggtctgtttttcaccggcttctcgcaggagcaggcgaacccggatatgggcgatagcgcgattaccgaaacctttggtatcggaggtgcggcaatgatcgcagcgcctggcgtaacgcgctttgtcggtgcgggtggcatggaagcggcaagagcggtatctgaagagatggcggaaatttaccttgaacgcaatatgcagttgcagatcccaagctgggattttcagggcgcgtgcctggggctggacattcgtcgcgtggtagaaaccggcattacgccactcatcaataccggtatcgcccataaagaggcggggatcgggcagattggcgcaggcaccgtgcgggcaccgctggcgtgctttgaacaggcgctggaagcactggctgaaagcatgggtattggttgaggaacgcgcaatgacgatcatccatcctctgcttgccagtagtagcgcaccgaattatcgccagtcctggcggttagcgggagtgtggcggcgggcgattaacctgatgacggaaagcggcgaactgttaacgttgcatcgtcagggtagtggtttcggccccggaggatgggtgcttcgccgtgcgcaattcgatgcgttatgcggtggattatgcggcaatgaacgaccacaggttgtggctcaagggattcgcctcgggcgtttcacggttaaacagccacagcgttattgtttgctgcgtattacgccgcctgcgcatcctcaaccacttgcagctgcatggatgcaacgcgcggaggaaaccgggcttttcgggccactggcgttggcggcaagcgatccgctgcctgctgagttacgccagtttcgtcactgttttcaggccgcgctcaatggcgttaagaccgactggcggcactggctgggtaaaggccccggattaacgccgagtcatgatgacacgctgagcggaatgctgctggcggcctggtattatggcgctttagatgcgcgctccggtcgtccgttttttgcctgttccgacaatctgcaactcgttaccacagcggtgagcgtcagttatttacgttatgccgcgcaaggatatttcgccagcccactcctgcactttgttcatgctctgagttgcccgaaacgtaccgctgttgcgattgatagcctgctggcgctggggcatacgagtggggcagatacgctgctggggttctggcttggccaacaattattacaaggaaaaccatgaaaacactggttgtggctcttgggggcaacgccttactccagcgcggtgaggcgctgacggcagaaaatcaatatcgcaatatcgccagtgctgtacccgcgctggcacgcctggcccgttcttatcggttggcgattgttcacggcaacgggccgcaggtggggctgctggcattgcagaatctggcgtggaaagaggtagaaccgtatccgctggatgtgctggttgcggaaagccaggggatgattggctatatgctggcgcagagtttgagcgcacagccgcagatgccgcccgtgacgacggtgctgacgcgcattgaggttagccctgatgatccggcgtttttgcagccagagaaatttattggtccggtttatcagccagaagaacaagaggcactggaagcggcttacggctggcagatgaaacgtgatggtaaatatttgcgccgggtggtggcgtctccgcaaccgcgtaaaattctcgacagcgaagccatcgagttgttgctcaaagaggggcatgtggtgatttgcagtggcggcggcggtgtgcctgtgacggatgacggagcagggagtgaagcagtgattgataaagatctcgccgctgcgttgctcgccgagcagattaatgcagatggactggtgatcctcaccgatgctgatgcggtatatgaaaactggggaacgccgcagcaacgtgccattcgccatgccacaccggatgagttagcgccatttgccaaagccgatggtagcatggggccgaatgtaacggcggtgagtggttatgtcagaagccgtggtaaacccgcgtggattggggcgttaagccgaattgaagagacgctggcgggcgaagcggggacctgtattagcctgtaatcgtaggcattagacatttgtgcctgatgcgacgcttgacgcgtcttatcaggcctacaaccggtgccgcatccggcaattggtgcacaatgcctgatgcgatgcttgacgcatcttatcaggcctacaatgggtaccggatcggtaggccggataaggcgtttacgccgcatccggcaagaatagagcaccagttaaccgaacttactctgcgcccaaatcacgccgctggcatattccggcggcagcagcgggattaaggcttccagcgtcgcagtcagacggcttgtgtcgctgtcggtcaaattcagatgccccactttacgccccggacggacttctttgtcgtaccagtgcagatgcaccagcggcagtttcagccagtcataattcacatcgctaccaatcagattgatcatcacgctcggattattcaccactggttgcggtaacggcagatcggtaatcgcccgcagatgcagctcaaactggctgatgctggcaccgttttgtgtccagtgaccgctgttatgcacacgcggtgccagttcgttgatcaacagaccttgcggggtgacaaaacactccatcgccatcacgcccacatagcccagctcctgcataatcgcgctcagcatctcttcggcttgcgcctgctgctgtgcgttggcctgcggaaaagcgacgctggtgcgcaaaataccgtcctgatgcaggttatgcgtcagcggataaaacacggtgctgccatcaaagccgcgcgcgccaaccaggctcacttcaccagagaagttaatgccctgctcgacaatacattcgccgtaacactctgccggtaactgttcggtttcatttgcgcgtaaacgccattgaccgcgaccgtcataaccaccagtgcgacgcttaacaatcgccagctcacctaaacgatcaaacaccgcaggccactcgctgcgttcggcaagtaactgccacggtgcagtcggcaggtggagcttatcgaaaagctgcttctgagtcagacggtcagcaataatcgggaacacatcgcggttcacaaaggccggatggcgcgccagctcgcgggttaatgcggtttccggccagcgttctatctcagcggtaatcacgctttgttgaaaaggcaccgccgccggttcagcgtccagcccgactggccagacagcaatgcctaacggttcgcctgcctgacgcagcatacggcctaactgcccgttaccgaggacgcaaacctgtttcatgccgcacctcgcgggtccgggttttccagcacttcgtcggtctgggctttgcgccagtcattcagacgctggtgcagttctttatcatgagtcgcaagaatttgtgctgccagtaacgccgcgtttgccgcgccagctttaccaatcgccagcgtacccaccggaatgccgcgcggcatttgtacgatggagtagaggctatcgacaccgctcagtgcggcgctctgtactggcacgcccagcaccggcaccagcgttttggcggcaatcatgcctggcagatgcgctgcgccgcctgcgcccgcaataatcacctgataaccgttctcttcggcgctttcggcgaagctgaacagtttatcgggggtgcggtgagcagaaaccacttcaacgtggtgcgggacattcaggatttcgaagatttcggcggcgaactgcatggtagcccagtcgcttttggaccccatcacgatggcgacacgcgccggattattgcgggaagacatgcgtcttaaaactcctgtggtgcacaactctcggctttagagggcacagagaatagcacggaaagagagcaaggaaaacggttgcgtggctgtgaaatcagcaaagttgcgggttttttaaaacggaaaatgaatcagctcaacgtcatccgccgtgactttcaccatactaccttccgtatgccaggcacccagtaccacgcgaaaagcaggttgctgattggcgataagttcatgcaccgccgggcgatgggtatgcccgtggatcagccattgcacctgatgtttttccatcgcactgaccaccgcgttttggttaacgtccatgatcgccaggcttttactgctgttggcttctttgctgttcgcgcgcattcgcgcggcaatgcgtttgcgcacaaacaacggcagggcgaggaatagcgtctgcagccagggtttgtggaccttggcgcgaaaagcctgataacccgcgtcatcggtgcacagcgtgtcgccatgcataatcaacacccggcgaccataaagttcgagcaccttttcttccggcaataacgtcatgccactttcacgggcaaagcgtttgccgagcagaaaatcacggttgccatgaatgaaataacagggaacgccggaatcggacaccgctttgatcgccgccgccatcttgcgatggagtgggttgggatcgtcgtcgccaatccatgcttcaaacagatcgccaagaatatacagcgcgtcggccttgcgggcttcccccgctaaaaaacgcagaaaaccggcggtgatcgccggttcttccacgcagagatgaagatctgcaataaagagtgtcgccacgattactcgctaacggtcacgctttcaatgataacgtcttcttttggcacgtcctggtgcataccgctacgaccggttgcaacacctttgattttgtctaccacgtccatgccgtcaaccacttcagcaaacacgcagtagccccaaccttgcaggctttcgccagagaagttcaggaagtcgttatcaaccacgttgatgaagaactgtgcagttgcagagtgcggagcctgagtacgtgccattgccagcgtaccacgggtatttttcaggccgttgttggcttcgtttttgatcggttctttggtggctttttgtttcatgcccggttcaaaaccgccgccctgaatcataaagccgttgataacacggtggaaaatggtgttgttgtaaaaaccttcgcggcagtagtccaggaagtttttaactgtttcaggtgctttatcgtcaaaagttttgatgacaatatcgccgtgattggtgtggaaagtaaccatttttgcatcctgttccgtttgattggtgcttcaacccagttcgggtcatatatagggtggtgttatagcataaccgcacgatcggatcatcacgcaatgtatgctgattcgcgcgggaaatatgggtattatacgcaactcaattacccacacatgtctaaacggaatcttcgatgctaaaaatcttcaatactctgacacgccaaaaagaggaatttaagcctattcacgccggggaagtcggcatgtacgtgtgtggaatcaccgtttacgatctctgtcatatcggtcacgggcgtacctttgttgcttttgacgtggttgcgcgctatctgcgtttcctcggctataaactgaagtatgtgcgcaacattaccgatatcgacgacaaaatcatcaaacgcgccaatgaaaatggcgaaagctttgtggcgatggtggatcgcatgatcgccgaaatgcacaaagattttgatgctttgaacattctgcgcccggatatggagccgcgcgcgacgcaccatatcgcagaaattattgaactcactgaacaactgatcgccaaaggtcacgcttatgtggcggacaacggcgacgtgatgttcgacgtcccgaccgatccaacttatggcgtgctgagccgtcaggatctcgaccagctgcaggcaggcgcgcgcgttgacgtggtcgacgacaaacgcaacccaatggacttcgttctgtggaagatgagcaaagagggcgaaccgagctggccgtctccgtggggcgcgggtcgtcctggctggcacattgaatgtagcgcaatgaactgcaagcagctgggtaaccactttgatatccacggcggcggtagtgacctgatgttcccgcaccacgaaaacgaaatcgcgcagtccacctgtgcccatgatggtcagtatgtgaactactggatgcacagcgggatggtgatggttgaccgcgagaagatgtccaaaagcctgggtaacttctttaccgtgcgcgatgtgctgaaatactacgacgcggaaaccgtgcgttacttcctgatgagcggccactatcgcagccagttgaactacagcgaagagaacctgaagcaggcgcgtgcggcgctggagcgtctctacactgcgctgcgcggcacagataaaaccgttgcgcctgccggtggcgaagcgtttgaagcgcgctttattgaagcgatggacgacgatttcaacaccccggaagcctattccgtactgtttgatatggcgcgtgaagtaaaccgtctgaaagcagaagatatggcagcggcgaatgcaatggcatctcacctgcgtaaactttccgctgtattgggcctgctggagcaagaaccggaagcgttcctgcaaagcggcgcgcaggcagacgacagcgaagtggctgagattgaagcgttaattcaacagcgtctggatgcccgtaaagcgaaagactgggcggcggcggatgcggcgcgtgatcgtcttaacgagatggggatcgtgctggaagatggcccgcaagggaccacctggcgtcgtaagtaattgcgctattgccggatgcgagttttcgcatccggttatcgtctgcgccaccacaacattcccatcagtagcatccccggcaaccacacccacatcaattcagaaataatcacctgatgcccgtacggcgtggtgtaacgagacaatgcaaacggcgcgacttttatcacctgccagggagcgaaaaagcgttcatcactccacggccacagccagccaacgcctttaccgccagtggttacgctatccagcaagctgtggcttagcaagctgacggttaaaaacagccagcagcgaatcagcccagccctgaaccatcggcgtccaataaacacacataacagcgggacaacaaacgcaaacaccaggctatgggtaaacccgcgatgaccaaaaacattgccgtaagcaacgccaaatttaaagctcaatacgtcggcgtcgggcagcatcgccaggatgattccggcaaataacagacgcggagggatgactttgctacccaaccctaaaccaatgcataggggaacggcggcgtgcgtaataacggttggcatgatggtcgcttcggcaaaatgtcgatgctatcagcatggatgaacggggcgtagagggcaaaagtctgaaaagagaaccggcctgttgatacaggccgggaaagggatcaggcaacaacctgtacgctgtgacctgcaaaactcactgtctgaccggcgacgattttgcagcgtttgcgcgtttcaaccgcaccgtcgactttcacctggccttcggcaatcgcgattttcgcctgcgcgccgctttcgctccagccttccagtttcagcaagtcgcacagctcaacgtgcggatgtttacctaaagaaaatgtcgccatgttactcatcctgtggatcatgatattcaacgcacgcctgtagcgtgttttcaatcagcgtggcaaccgtcatcgggccaacgccgccgggaacaggcgtaatgtaactggcgcgtttagccgcgtcttcaaacacgacgtcgcccacaactttgccattttccagacggttgatgccgacatcaatcacaattgcgccttctttgatccagtcaccgggaataaagcctggcttgccaacggcaacgatcaatagatcggcattttctacgtgatgacgcagatttttagtgaagcggtgagtcactgtagtggtgcaacctgccagcagcagttccatgctcatcgggcggccaacgatattgcttgcgccaatcaccacggcgttgaggccgaaggtatcaatgttgtaacgctcaagcagcgtgacgataccgcgcggggtgcagggacgcagacgcggcgcgcgctggcacagacgaccgacgttgtaaggatggaaaccgtccacgtctttgtccggatgaatacgttccagcactttgacgttatcaatacccgccggtaacggcagttgaaccagaatgccatcgatggtgttgtcggcattcagcgtatcgataagctccagcagctccgcttcgctggtggtttccgggaggtcataagagcgggagacgaacccgacttcttcacaagccttgcgtttgcttgcgacataaatttggcttgcagggttactacccaccagcacaacggccagtcctggtgcccgcagtccggctgcaatacgcgcctgaactttttgagcaacttcagagcgcacctgctgcgcaatcgttttaccgtcaataatctttgctgccatcagagagaggattccatctgttacgtagatcgaaggggatgcgcctattttgtcagaagcggggcgcgctgtcaggtttcgtttcagatttatcgcgtgaagcgacctcttgcgaaggtgaggcgcaccgtcgctgagactgaaagcttcatttttcgtccatgatggcgttgtaaatctggaactgatttatttccttgtctaaggattaagataatttaagaaatacctgacaatataaaaagaattttcagcctggtaatttaccgcttcaggtctatatttgtgttgaatatattttgcgcggaagtattcatctaacggggctctctattttttagaatagagtgcatattttcaattaagacattcttagaggataaaaaggaatttactactatcagtgtcttaaataaagtaatcggttatatacggatgtggagtcgataaatgagattgaaggaatatatatgaaattaagatttattagctctgcgctggctgccgcactattcgccgctacgggtagttatgctgccgttgtagatggcggtacaattcactttgaaggcgaactggtgaatgctgcctgtagtgtgaatactgacagcgcagaccaggttgtcacactcggtcaatatcgtaccgatattttcaatgctgttggtaatacctctgcattaattccattcaccattcagttgaacgactgcgatcctgttgttgccgctaatgctgccgttgcattttctggtcaggctgatgcaatcaatgataatttattggccattgcatccagtaccaatacaacaacagcaacgggtgtcggtattgaaatacttgataatacatccgcaattctcaaacctgatgggaatagcttcagtaccaaccagaacttgatccccgggaccaacgttcttcatttttctgcacgttataaaggcaccggtacaagtgcaagtgcagggcaagcaaatgctgacgcgacttttattatgagatatgaataatcaaaaccacgttgttttgaattatatatcacgtcttataacaaagtaatgtaccggttgtctgaagcggtatggtggcaatgtaaatcgaaatcatgttcactttgtatcatgccgctttattaaatgaaaagggaatgatgtgttgtaagaaaccaaagcaatcatttctttatattccttatttttgccgtcaggaatacacaaggcgtattaactatgatgactaaaataaagttattgatgctcattatattttatttaatcattagcgccagcgcccatgctgccggagggatcgcattaggtgccacgcgtattatttatcccgctgatgctaaacagactgcggtatggattagaaatagccataccaatgagcgctttctggtcaatagctggattgaaaacagcagcggtgtaaaagaaaagagtttcatcattacaccgccactgtttgttagtgaacccaaaagcgaaaatactttgcgtattatttacaccggtccaccgctggcagcagatcgtgagtctctgttctggatgaatgttaagacgatccctagcgtagataaaaatgcattgaacggcaggaatgttttgcaactggcgattttaagccgcatgaaattatttctccgtccaattcaattacaagaattacccgcagaagcgccggacacactcaagtttagccgatccggtaactatatcaatgttcataatccaagtcctttttatgtcaccctggttaacttacaagtgggcagccaaaagttggggaatgctatggctgcacccagagttaatagtcaaattcccttacccagtggagtgcagggaaagctgaaatttcagaccgttaatgattatggtagtgtaactccggtcagagaagtgaacttaaactaaccgaatcatctgacaatatcagagctaattatgaaaatacccactactacggatattccgcagaggtatacctggtgtctggccggaatttgttatagttctcttgccattttaccctcctttttaagctatgcggaaagttatttcaacccggcatttttattagagaatggcacatccgttgctgatttaagccgctttgagagaggtaatcatcaacctgcgggcgtgtatcgggtggatctctggcgtaatgatgagttcattggtagccaggatatcgtatttgaaagcacaacagaaaatacaggtgataaaagtggtgggttaatgccctgttttaaccaggtacttcttgaacgaattggccttaatagcagtgcatttcccgagttagcccagcagcaaaacaataaatgcatcaatttactgaaagctgtacctgatgccacaattaactttgattttgcagcgatgcgcctgaacatcactattcctcagatagcgttgttgagtagcgctcacggttacattccgcctgaagagtgggatgaaggtattcctgctttactcctgaattataatttcaccggtaacagaggtaatggtaacgatagctatttttttagtgagctcagcgggattaatattggcccgtggcgtttacgcaacaatggttcctggaactattttcgcggaaatggatatcatagtgaacagtggaataatattggcacctgggtacagcgcgccattattccgctgaaaagtgaactggtaatgggagacggcaatacaggaagtgatattttcgatggcgttggatttcgtggtgtacggctttattcttctgataatatgtatcctgatagccagcaagggtttgccccaacggtacgtgggattgcccgtacggcggcccagctaacgattcggcaaaatggttttattatctatcaaagctatgtttcccccggcgcttttgaaattacagatttgcacccgacatctagtaatggcgatctggacgtcaccatcgacgagcgcgatggcaatcagcagaattacacaattccgtatagtacagtgccaattttacaacgcgaagggcgtttcaaatttgacctgacggcgggcgattttcgtagcggtaatagtcagcaaagtagccctttcttttttcagggtacggcactcggcggtttaccacaggaatttactgcctacggcgggacgcaattatctgccaattacaccgcctttttattagggctggggcgcaatctcgggaactggggcgcagtgagcctggatgtaacgcatgcgcgcagtcagttagccgacgccagtcgtcatgagggggattctattcgcttcctctatgcgaaaagcatgaacaccttcggcaccaattttcagttaatgggttaccgctatagcacacaaggtttttatacccttgatgatgttgcgtatcgtcgaatggaggggtacgaatatgattacgacggtgagcatcgcgatgaaccgataatcgtgaattaccacaatttacgctttagccgtaaagaccgtttgcagttaaatgttagtcaaagtcttaatgactttggcagcctttatatttctggtacccatcaaaaatactggaatactagcgatagtgatacgtggtatcaggtggggtataccagcagctgggttggcatcagttatagcctcagttttagctggaatgaatctgtagggatccccgataacgaacgtattgtcggacttaatgttagtgtgcctttcaatgttttgaccaaacgtcgctacacccgggaaaatgcgctcgaccgcgcttatgcctcctttaacgccaaccgtaacagcaacgggcaaaatagctggctggcaggtgtaggtgggaccttactggaaggccacaacctgagttatcacgtaagccagggtgataccagcaataatgggtacacgggcagcgccacggcaaactggcaggccgcttacggtacgctggggggcgggtataactacgaccgcgatcaacatgacgttaactggcagctgtctggcggtgtggtcgggcatgaaaatggcataacgctgagccagcctttaggggataccaatgttttgattaaagcgcctggcgcaggcggtgtacgcattgaaaatcaaactggcattttaaccgactggcgcggctatgcggtgatgctgtatgccacggtttatcggtataaccgtatcgcgcttgataccaatacgatggggaattccatcgatgttgaaaaaaatattagcagcgttgtgccgacgcaaggcgcgttggttcgtgccaattttgatacccgcataggcgtgcgggcgctcattaccgttacccagggcggaaaaccggtgccgtttggaagtctggtacgggaaaacagtaccggaataaccagtatggtgggtgatgacgggcaagtttatttaagtggtgcgccattgtctggtgaattactggttcagtggggagacggcgcgaacagtcgctgcattgcgcactatgtattgccgaagcaaagcttacagcaagccgtcactgttattagcgcagtttgcacacatcctggcagttaaaggaaattatcaataagataatctgcagattattattggcgatggcatgtttgtgtctggcaaacatatcctgggctactgtttgtgcaaatagtactggcgtagcagaagatgaacactatgatctcagtaatatctttaatagcaccaataaccagccagggcagattgttgttttaccggaaaaatccggctgggtaggtgtcagtgcaatttgtccacccggtacgctggtgaattatacataccgtagttatgtcaccaactttattgttcaggaaactatcgataattataaatatatgcaattacatgattatctattaggtgcgatgagtctggttgatagtgtgatggatattcagttccccccgcaaaattatattcggatgggaacagatcctaacgttagccaaaaccttccattcggggtgatggattctcgtttaatatttcgtttaaaggttattcgtccctttattaacatggtggagatccccagacaggtgatgtttaccgtgtatgtgacaagtacgccttacgatccgttggttacacctgtttataccattagttttggtggccgggttgaagtaccgcaaaactgcgaattaaatgccgggcagattgttgaatttgattttggtgatatcggcgcaagcttatttagtgcggcagggccgggtaatcgacctgctggtgtcatgccgcaaaccaagagcattgcggtcaaatgtacgaatgttgctgcgcaggcttatttaacaatgcgtctggaagccagtgccgtttctggtcaggcgatggtgagcgacaatcaggatttaggttttattgtcgccgatcagaacgatacgccgatcacgcctaacgatctcaatagcgttattcctttccgtctggatgcagctgcggcagccaatgtcacacttcgcgcctggcctatcagtattaccggtcaaaaaccgaccgaagggccgtttagcgcgctggggtatttacgcgtcgattatcaatgaggtacggagaatgagaagagtactctttagctgtttctgcgggctactgtggagttccagtggatgggcagttgaccctttaggaacgattaatatcaatttgcacggtaacgttgttgatttctcctgtaccgtaaacacagcggatattgataagacggtagatttaggcagatggcctacgatacaactactgaacgctggcgataccacggcactcgtcccttttagcctgcggctggagggatgtcctccgggtagtgttgcgattttatttacgggaacgccggcatccgataccaacctgctggctctggatgatcccgcaatggcacaaaccgtcgccatcgaattacgtaatagcgatcgctcccggctcgcactgggggaggcgagcccgactgaggaagtagatgcaaatggcaatgtcacactaaacttttttgccaattatcgagcgttagccagcggtgttcggccaggtgtggcgaaagcggatgcgatatttatgatcaattataattaatattatattaattcgtataatttggcgtagtcgataagctctacaatactatgcaaacctagcttgccataaatattagatttatgcgcactaactgttttattgctaagtaataacttatcggcaatttctttattagataatccgctaaccagataacgtaatatggtcacttcacgattagatagcacagtgaccgtactactattcgtactacatttattgctttttatatagttaagcgtttcgctgggaaaaaacgtgtatccggagaggatcatctgaacggcatgaaaaatatcattctgatcattgcatttactgacaaaaccgttagcaccagcttgtatcgctctgccagcataaaagcattcacttttgctacttaaaaataacactttcactgtgctctggatttgtttgatccttttcaggaaggtaaaaccgtctgttccgggcaagtctatatccataatgattaaatcaacaggacgggttcggagataatcgatggttatgcgataatcatccgttttcaggacaatctgcaattcactgtttttttgcaacagaacttcaatagacattctgatgataggatgagtatccataatgatcacgctcgttggtttcatagttaccagtctcataggagcggacaattttccgttaggtcgggaaattgtactttgatacatgaaaatacgggttttcttgattcagacgcgcagcggtgtgcgtttgtttgccgctatagcgaaataaatcagaaaatcagacgcggtcgttcacttgttcagcaaccagatcaaaagccattgactcagcaagggttgaccgtataattcacgcgattacaccgcattgcggtatcaacgcgcccttagctcagttggatagagcaacgaccttctaagtcgtgggccgcaggttcgaatcctgcagggcgcgccattacaattcaatcagttacgccttctttatatcctccataatttcagagtgggacatatttgggacattatcaccaaaaatgtcgtctattttcctcgcatgctctgtcaaatgattaggcgcaaggtgagcatacctacgaaccatttctatggactcccatccgcccatttcctgaagcactgataatgggacgcctgactgaatcagccagcttgcccaggtgtgtctgaggtcatggaaacggaaatcttcctcatttatgcccgtcttatccgtttccgctttgcccttcaccacatcactttttgtcgctgtttggcgagataattcaacggtgtcaggccgtaaaacgccttaaaaacagagataaagtagctcgtgctgctatagccacataattgcgccacctgagtgatatttttgttatccatcaataacatctgtacggcgtaacgcatacgacactctgtgacaatctggctatagctggtattttcgttttttaatttctttttgagcaggctggggcttaaacataggctactggcgacaattcgcagattccagtaatgctgaatatcgctttgaataatgcggcagacgctgtcgcggacgctgctgcgtaagatatacatcagtagggcaataaaccggctttgctcaagaaagttagacaatacggtaaaaagcaatgcgcgcgtcaactccgcttcgcagggtctgctgggttgctgcttgctgtggttggcggctagccggaacacttccggtgtacggctatgacaagcgataaccggggttgccagccggctccagggctttacacaggttaagttcttatttaaaaacaacagataatcgttgatgatgttacggttgatgtgggtgattaatacgtgatttaacgtactgagttcaatgacgttattgttgcacgcgaaggcggccaggtagtttttcggaagggtaaacgtagcatggttattgacgcttacctctacctctttttcggtcaggatcaccacgcaaggttcactgctgctcaattgcatttcgcactcctcagatatcagaaactccgctcaaaggatctatgcttcctgcatgagtgatcggcccgttcgccgataacgatcttctttctttagcacgctttttagcaattaatcttgatggaattctgatgagagcgaaagaggtaagccaggtcgtacccgacttacctggaggagatttaatactcgagaatgccgtgcgcgacgggcaaatagcgcagagagaaatagagagtgtctttaccgcaagaggaacgtttcgctaacaggctggcaatttctgcgtccggtttcggtttcgctgtaaaggttttgcctttgccggcgacaaaaagttcataaacaacgccgctggcaggggcgggactttggcaatcggcgctggcctgtaaataacgttcacgctgttcagcggtcagtttatccacgccgctgccatcctgtacccagacattaacgccggttgctttaacgtgttccagcagttggcgatagccatcggggctcatgtttccggcgaaaaaactactgatataaaccggttttgcactaacatcgctaatcagccgctgcgcgttgtttaaccatgttagcaaaggctgacgggcggcttcgctgcgccagttcaggtcgtcaatttccgcgctgatgtaccagccatccggcgttatgccaggcgcggcgctccataatctggcttgctggagatcggcagccagcaggcgattaagatagctttccagcgctgcggagctctgtttctggtgcataaaaaattccggatcggcgttcagcccgacaataagcttcagaccagcctgttgcgcagctgcggcccgcttaaacaataacgtgcgctgttctggctgggtaaatgcatcgccgtaacgggtccattgcaaaacaagggtatcgaagccttgcaaacgtaactgactcatcagcccctgccactgggtatcggtaacctgactatctcggttttgtggttgccagataatacctttcatcgcaaaggaaaaagggctgaccaaaagcagtgtcagcaatacgaaaatgaacttacgcatttaccagtgcactccaatggtgagaaacgcgttgttgcgctctccgttacgttgattaatcgccttaaaggtatgttgatactcgacgccgagactgactttgtgcggccaggcgtcgtagtgcgtctcgccggtccagatattccagcggaccccgactccgccaagctgcgcgccctgagtgcctttatcacgatagccgttgtcctgaacgtgagcgtaaggctcaatagtctgtccgttagctaccttctgatgccagctgacgcgataatctgccgtccacgcctgaatatcctggcggatatattgcgccgcatcgaggtacaggttttgggcaaaccagccactaccgttcgggtgccattcgtcgctgtatttgccgccattaaagaaactggcgctggcgcgcagcatggtatcggatgcgccattttggccgttcagcggcaactgctgttcgacggcgatgaaaaagatctgatcgcgcagcggcttccagcgcagaccggtgccggacatcggatttttcaccggcatcatcaccccgttttctccggtatcggcaaagacgcggctataaacactgagcaggtcgccttccagcagcatattgcgtccgatgcggtactcggcttccagttgtccgtagctacgatagcttttccctggcgctgcgccgccgacattattgttagcggtactcattgcgccggaacgcaagccgatggaagaatcgaaactgaacgtccagcggcgaccgacctcctcatgcaaacggcggaaattgaagcgttgttgattttgttctggggtcagtggggttatcagcgcctgattatcaatgtcatcaatcaccagccgggcgtagtgctgcgtcgcaggcatgtcatccagacgctggttcacgtaggccagttgtcggatcagtgccggatcgtccggaagccctttatgcgccggttcgagcatttcccggctctgtgcgatatcaccgctatcccacaaggcgtaaccaagcgctgcctgggtgttgctattattcggttccagttccagcgcggcgcgcaaatcactcaccgcggccgggacattatgacgttggcgataaattgtcgcccgcgcaacgtaagcgttggcagaaggcgcaatattgatactgcgcgtgagatcgttcagtgcgagttccggctgaccaggaatgtaacgttgcgcatgcagccaccagtagagggcattgcttcccagtccacgtttttctgcctgttgtagccagcgatcgcgagccgcaccatttcctgccgcctgggcggtattggcagcagcaagcagatcctcattgctcatgtcgtgaagactgattttctgccaggccgccagtgcggtggcgtagtcctcaacctgatacgcctgataggctaccgcacgatgttgccaggcgctcggttgtcgttgttcggcctgaagccatgcatacaacgccacaccgggtagcgtgtcccgataacactttgccagacggttccaggcggcggcatcgtaggaagggctcatatcgcccagcaagcgaactattgccgggcaattatctgcaatacccggcaactgactttgccactgacgttgctccgccagcggtaagggtttgcttaaaatcgccaccttcgccggcgttgccaggtaaggatgactttccagcagagacgccagtcgcgccattaaagtctggctgacacgcgcatcgccctggaaaggatagcgttgcagcaataaatcggcagcttcgcgactctgctcgttctgcatcagttgccaggttagttgatccaggcgggtaagatttgccggttcttgctgatacagcaatcgtgccagacgcagagcttcagccttgttacgggtcgccacgctgacagcataacgctcctcaagcatttcattggcggggagggtggcgagcagtttttgcgctgcgtcgtactgaccttcttttaacagcaccggtagcgtcgcgccaacaacatactggcggttgtcggcaaactgtaccgtataattcgccaacgcctgaacggggttagcgctgtatttagataacagatagagccaacttttctcttgtgcgtccgtggtaaatagtggcttattttcaatgagataatgctggaggcgtgctttttcgccacgataagccagcgcggtcgcgtaagtaatataactctgaggatcggtgaagatcccctgactttgcagtgccaggatccgatcgtccagctgcccggcaagaagcacgtcaaaccactgacggcgttctgccgcgcttaatgtgttctgctggcgtgcttcattgtatagcgtatctgcctgggaccattgtttcaggtagattgcccgttgcagcagatcggttcgcagcgtttttccttccgggcttgcagcaaacgtcgcatcgttcagttgcgctctggcgacaggtaactgtgccagccgcagggcattctgcccgacttcactgcgacaacgcagggtcggcgcagcatcgcacgctttttgctgggcaagcagttcttcaactgtcgtaacgcttttcacttcaaccggaatagccgccagactgcgctcaagtcgggcatctcctgggtgacgtttcagttgatcctcaagcaacagccgcgcccggtcatcatgaccaaaatggcgataggcttccgcaaggtataaagtcagcggaatattatccggcacctgctggtgtatatattcaaattcgcggatggcggttgcttcgtcgttatttttctgtgccttcagcgctttatcgagacggggataaataacaaaatggcgataatcgctcagccccagctcttctgcgctggtgccgatattgtctgcgagtgcgctggtactcaataaagacgtcagcagtaaaccagaccatccgatgacgcgattaaggttattctccttcattttcggactccagttgcgcaacctgttctgtgtttaaacctgctttgagtaatagactttgcatgctaacttgtaattcgcgttgaattgtcaggacgcgatccaacgtttcctggctgataacgccttcggtgaccaaaaacttgccgagcggcagagaactgcgttcatggcgcaataacaacacgttaattgcactacgattaatatgaccgagcgtggtcagtatttcggcgaacaggaactgatgcggcacatattgccgccagatttcaccggcctgctgttccgtgagccactgatgctgaaccgcattgtacaacattgcccgcggatcgtgaccgcgtcggcgtgcataccagtgacgtaaccctgtgacaatttgtccccgcagaacaatgacgtaacgcactttgcgtccgactttacgcgtcagggccgccaggctaaccgggtcaataccatcttcactgccgacaattaactcgtcattttccagacgcagcggcagtaccgcataatgcagcgccacggaggccggcatttcggcaatcaggctggaagggatctgccaggcatcgatggattcccacgccacgccgttttgctctgccagcgcctgtgccagctgctcggcgctaatcagcccctgcatcagcatactaccgcccaggcgtagaccttcgacgcgattacgcagtgctgtatcgagttgttcttcagtgatgacctgattttccagcagaatttgacctaacgggcgcaagctgcgggtatcgccagtcacgctggggaagtcatgcgttgttttatcccacgccacgcgacgtggatcgccgtgttgaagtacctgttttagcgcgcgccagttggccatgaagttaatcaggttgccccagaaaagacgcaggacggaaagcagcccctgcgtcaggccgtagtagccagtaacgaaaatcacccgctgcacgatgcggttaaccatcaaaccaaagtttagccacagcagggtcattaaccatgcgctgccgctgaaaatagaaaggaaatgccaggcatcgggccacaaactttcatacgccagcaacagcaaaagctggatcatcaccagcatcgcgaggaagctgacaaagttactgattgcccctttgcggtcgcgccagagaaagtagttcagcgtcaggctggaggtccatttatgggttttaaagccttggaaaacaatgccgatgatccagcgggatttttgtcgaaccgcagtgctaaaggtatcggggaaatattcgcgcacgcagatcatgttacttgtccgcgcgtgctgtaaaaatttacgctgctcgcgttctttggcttcgtccaccaccggaaaacggacaaaaatttccgtcatacctttttctttcaggcggaagccaatgtcgtaatcttcagtaagactctgcacgtcgaaagcaataccgtcaccgtcagctaacagtgcggtcacggcgcggcggctgaaacaggtgccgacgcctgcgctgggcacttgtccggcgagggcttcacgcaccggaacatctttgccatgcagctcactaaactcatcaatgtaagtcatgctggtgaagtgcgtccattcgcgttcgaacggatacaccgggatctgaatcagatctttacgctcgaccagatagttgaacagacgcaattccatcggactaatcacatcttcggcgtcatgcagaataaaaccagcaaaagcgaaattggcgctacgctcaaattgggtgatggcgtccagcacgttgttcagacagtcggctttgctggtggggccaggacgcgcgcagactaccttatgcacattcgggaagcgagcgcacacttcgtcaacatcacgctgagtatcggggtcgttggggtaggtgccaacaaagatatgatagttttcgtagtcgagcgtggtcgccgccagctcggccatattgccgatgacgcccgtttcattccacgccggaaccataatcgctaacggtttttcatctggtttatacagttcgcggtaactcattcgcgggtagcggcgataaacactcaacttgcgtttaatgcggcgtacccagtagacgacatcaataaaaaaatcgtccagcccgctgatgaacatgatgaccgctaacgttatcgcgattacttttaagccgtagagccaggtagcaaaaacatcaagaagccagtccacacaaaaaccttacattaacgctggttatgtttagggtggcgtatattaaggttttttatgaattgtgacagctttttaccattaataggtatgactattgcggcacgttatttttacactggttataaaagttgccgtttgctgaaggattaagcgggtaatgtgataacaaaccttgtcccccgcgcatcgctcgttaccgcaaccgtgcctttatgcgcgacaacaatgcttttcactatcgccaggccaataccgctaccttcaccttttcgctggcgggaggggtcaacgcgatagaaacggtcaaacaatcgcggtaagtgctcgggcgcaatgggcgtaccggggttttcgacgataacttgcaccaggtgatcgaccgtctgacagcgcactacaattgtctctccggttggcgtataacgcagggcgttgctaagcaggttgcttagcgcccgacgcagcatcagcggatcgcccgcgacctgacacttgtcgccaacaaaccgcaactccacgccgcgatcttccgctaacgcctcgaaaaaatcgaacactttgccgacttcatccgccaggttgagcattttcttttcggggattagctggttgttatcggcctgagcgagaaacagcatatcgctgaccattttcgccattcgcgtcagctcttcgagattagagtagagcacatcttccagctccttctggctgcggctctggctgagggcgatttcggtttgcgttatgagattcgtaattggtgtgcgaatttcgtgagcgatatccgcactgaaattggactggcgggtaaagacatcctcaatacgctcgatcatatggttgaagctcagtaccagctgttccagctcaatgggcacggtctgcgggtcgaggcgaacgtcgagatctttgctggtaatattctggatttgacggctgacgctgcggatcggcgcgtgacctttatgtaccgccaacagtacgataaagacgatcaggatgctgattacgcttgcggtcataataagtttattcatcaaatcatttatgtaatgaagatgaaaatcgatgctaagcgcgatgtagagcgtataaatcggtttgccgtccaccaacgggccaaccggcaagttaatcatccgccagttgctgtgttccatatgcccgtgaccgtggcctggcatcatcatcgtcgggccggaaaggagatacacctcgccaccctgagcgtctttatcgggtatggcgtcacgcgtaaactcgcggatatccggcgcaccgggggagtgatacaccgttttaccctgactatctgccagggaaatcaacacattggaataaccactgacgatatcttccagcgtcattaagcgtcgggcttgcgtttcgtcagggtgatttagtacccgttcaagggtggcgctaatctcttttaaatcattaatatcctgctcggcaaaatgaacttttacactgtggatcatgatccatgcaaaggcgaaaaacgccgcgatggtggccaggctgataaaaaaggtcaggcgggttgccaggctaaacgggcgctgaaatggcttactgaccatccggcacctcaagcatgtaacccacgccgcgcacggtctgaattagcttcggctcaaagtcgttgtcgattttgccgcgcagccgcttcaccgccacatcaatagcattggtatcgctgtcaaaattcatgtcccatacctggctggcgataaggctgcggggcagcacttcgccctgatggcgaaggaagaactccagcagagtaaactctttactggtcaaagtgatgcgcgtgccgctgcgggtgactttgcggctgacgagatcgaccatcaaatcggcaacctgaaactgactttcgataatcaccgccgccccgcgccgcagtaatgtgcgcacccgcgccagcagttcagcaaaagcgaatggcttcaccaggtagtcatctgcccccaactccagccccttgacgcgatgttcaatggtgccaagcgcggtaagcaacagaatcggcatccctttattggcggagcgtaacatgcgcacgatatcccagccgttcacgtccggcagcataatatcgaggattatcagatcataatcaccggtcatcgccagatggtagccattcagcccgttgtcggccaaatcgaccacaaaaccggcttcggttaaccctttggtcaagtattctccggttttcttttcatcttcgacaatcaacagtttcatatttcctccgcatgttgcccgggcaattctagagtagcgggatcagatggcaatcgcttattggcaaaatgacaattttgtcatttttctgtcaccggaaaatcagagcctggcgagtaaagttggcggcataaaatcaccagaaattatgagcctatgtctccttgtaaacttctgccattttgtgtggcccttgcgctaaccggttgtagtctggcaccggattatcagcgtccggcaatgcccgtgccgcagcagttcagtctcagccagaacggcctggttaacgcagcagataactatcagaacgcgggctggcgcaccttttttgttgataatcaggtgaagacgctgattagcgaggcgctggtgaataatcgggatttgcgcatggcgacgctgaaagtgcaggaggcacgggcgcaatatcgtctgaccgatgccgaccgctacccacagctcaatggcgagggcagcggcagctggagcggtaatcttaaagggaataccgccacgacacgggagtttagcaccggccttaacgccagctttgacctcgattttttcggtcgcttaaagaacatgagcgaagccgagcgacaaaattatttagccactgaggaagctcagcgcgcggtgcatattctgctggtttctaatgtcgcgcaaagctatttcaatcagcaactggcgtatgcgcaattgcaaatagccgaagaaacgctgcgtaattatcagcagagttatgcgtttgtcgaaaaacaactgttgacaggtagcagtaatgttctggcgctggaacaggctcgcggggtgatagaaagtacccgcagcgacatcgctaaacgtcagggggaactggcgcaggcgaataatgcattgcaactgttgctgggaagctacggcaagctgccgcaagcgcagacagtaaacagcgacagcctgcaaagcgttaaattaccggcgggattgagcagccaaatcttattgcagcgcccggatattatggaagctgaacacgcgttaatggcggctaatgccaatattggcgctgcacgcgcggcattttttccgtctataagcctgaccagcggaataagcaccgccagtagcgatctaagcagtttatttaacgccagcagcgggatgtggaattttatacccaaaattgagatccccatttttaatgccggacgcaaccaggccaatctggatatcgccgaaattcgccagcagcagagcgtggtgaattatgaacagaaaatccagaacgcctttaaagaagtggcagatgcgctggcattacgtcaaagcctgaacgatcaaattagcgcccagcagcgttatctggcaagcctgcaaattactttgcaacgggcgcgggcattatatcagcacggcgcagtaagttatctggaagtgctggatgccgagcgttctttatttgcaacccgacaaactttacttgatctgaattatgcccgtcaggttaacgaaatttctttgtataccgcacttggtggcggttgacagcaatatactcgtcatacttcaagttgcatgtgctgcgtctgcgttcgctcaccccagtcacttacttatgtaagctcctggggattcactcgcttgtcgccttcctgcaactcgaattatttagagtatgacttttaactccaggagagaataaatgaaaaaagcactgcaagtcgcaatgttcagtctgtttaccgttattggctttaatgcccaggctaacgaacatcatcatgaaaccatgagcgaagcacaaccacaggttattagcgccactggcgtggtaaagggtatcgatctggaaagcaaaaaaatcaccatccatcacgatccgattgctgccgtgaactggccggagatgaccatgcgctttaccatcaccccgcagacgaaaatgagtgaaattaaaaccggcgacaaagtggcgtttaattttgtccagcagggcaacctttctttattacaggatattaaagtcagccagtaacccaggtttaatgagatgaaaaaaatcgcgcttattatcggcagcatgatcgcgggcggtattatttctgcggcaggttttacctgggttgcaaaggcggaaccgcctgcagaaaaaacgagcaccgcagaacgtaaaatcttattctggtacgacccaatgtatcccaatacgcggttcgataaaccaggtaaaagcccgtttatggatatggatctggtgccgaaatatgccgatgaagagagttctgcgtctggtgtgcgcattgacccgactcagacgcagaatctgggggtgaaaacggctaccgtcacgcgcggaccgctgacttttgcccagagtttcccggcgaatgtcagttacaacgagtatcagtatgccattgtgcaggctcgcgctgccgggtttatcgacaaggtgtatccgcttaccgtgggcgataaagtacaaaagggcacaccgcttctcgacctgaccattcctgactgggtggaagcgcagagtgagtatttactgctgcgcgaaaccggcggtacggcgacccagactgaaggcattcttgagcggctgcgactggcgggaatgccggaggcggatattcgccgcctgatcgccacgcaaaaaatccagactcgctttacgctcaaagcgcccattgatggcgtgatcaccgcgtttgatctgcgcgcgggaatgaatatcgccaaagataacgtggtagcgaaaattcagggtatggacccggtgtgggtcactgctgcgatcccggagtctatcgcctggctggtgaaagatgccagccagtttaccctcaccgttccggcgcgaccggataaaacactcaccatccgcaaatggacgctgctacctggcgtggatgccgcgacccgcacgctgcagctgcgtctggaagtcgacaacgccgacgaggcgctaaaaccgggcatgaacgcctggttgcaactcaacaccgccagcgaaccgatgctgctcattccgagtcaagcgctgattgataccggcagcgaacagcgggtgattaccgttgatgccgacgggcgctttgtaccgaaacgcgttgctgttttccaggcaagccaaggcgtcaccgcattacgctctggtctggcggaaggtgaaaaggtggtttccagcggcctgttcctgattgattccgaagccaatatttctggcgcactggagcggatgcgctctgaaagtgcgacccatgcgcattgagggaataaccaatgattgaatggattattcgtcgcagcgtggcgaaccgttttttggtgctgatgggcgcgttgtttctgagcatctggggcacctggaccatcattaatacgccagtggatgcgctgccggatctctccgatgtgcaggttattattaaaaccagctatcccggtcaggcaccacaaatcgttgaaaatcaggtgacttatccgctaaccaccaccatgttgagcgtgcctggcgcgaagactgtgcgcggtttcagtcagtttggcgactcttatgtgtatgtcattttcgaagatggcaccgatccgtactgggcgcgtagccgggtgctggagtacctcaaccaggtacagggtaagctgcctgcgggagtcagcgccgagctggggccagatgccacgggtgttggctggatctatgaatatgcactggtggatcgcagcggtaagcacgatctggccgatttacgcagtttacaggactggtttctcaaatatgagctgaaaaccatccctgacgttgcggaagtggcgagcgtgggcggtgtggtgaaagagtatcaggtggttatcgatccccagcgcctggcgcagtatggcatcagtctcgccgaagtaaaaagcgcgctggatgctagtaaccaggaagcgggcggtagcagcatcgaactggcggaagcggaatatatggtgcgcgccagcggctatctgcaaacgctcgacgactttaatcacatcgctttaaaagccagtgaaaatggcgtgcccgtttatctgcgcgatgttgcgaaggtccagattggcccggagatgcgccggggcattgccgaactaaacggcgaaggcgaagtggcgggcggggtggtgatcctgcgatccggcaaaaacgcccgagaagtgatcgccgccgtgaaggacaaactggaaacgctgaaaagtagtctgccggaaggcgtggagatagttacaacatacgatcgcagccagctcattgaccgcgccatcgacaacctcagcggcaagttgctggaagagtttattgtggtggcggtagtctgtgcgctgtttctctggcatgtgcgcagcgcgctggtggcgattattagcttgccgctggggttgtgtattgcttttattgtcatgcacttccagggactgaatgccaatattatgagcttgggtggcattgcgattgccgtcggggcgatggtcgatgctgctatcgtcatgatcgagaatgcgcataaacggctggaagagtggcagcaccagcatcctgacgccacgctggataataaaacgcgctggcaggtgatcaccgatgcgtctgttgaagtggggccggcgctatttatcagtctgctgattatcacgttgagctttatcccgatcttcaccctggaagggcaggaagggcgtctgtttggcccgttggcgttcaccaaaacgtatgcgatggcgggtgcggcgctgctggcgatcgtagtgatcccgatcctgatgggctactggatccgtggcaaaattccgccggaaagcagtaacccgctcaatcgctttttgattcgtgtttatcatccgctgttgctgaaagtactgcactggccgaaaaccacgctgctggtggcggcgcttagcgtgctgacggttctctggccgctcaataaagttggcggggaatttttaccgcagatcaatgaaggcgacttgttgtatatgccaagcacgctgccggggatttccgcagcagaggcggcgagtatgctgcaaaaaaccgacaagctaattatgagcgtacctgaagtggcgcgggtatttggcaaaaccgggaaagcggaaaccgccaccgattctgctccgctggagatggtagaaacgaccatccagcttaagccgcaggagcagtggcggccaggcatgacgatggacaaaatcattgaggaactggataacaccgtgcggctgccggggctggcgaatctgtgggtgccgccaattcgtaaccgtatcgatatgctcagtaccggcattaaaagccccatcggcattaaagtttccggcactgtgctggcggatatcgacgcgatggctgagcaaattgaagaagtagcgcgaacggtgccaggcgtagcttctgcgcttgccgagcggctggaaggtgggcgctatatcaacgttgagattaaccgtgaaaaagccgcacgttacggtatgacggtggcggatgtgcagttgtttgtgacttctgcggtgggcggggcgatggttggcgaaacggtggaagggattgcccgttatccaattaatctgcgttatccgcaaagctggcgcgatagtccgcaggcactgcgccagctgccgatcctgacgccgatgaagcagcaaatcaccctggcagacgtggccgacattaaagtctctaccggaccgagcatgctgaaaaccgagaatgcgcgcccgacgagctggatttatatcgatgcccgcgatcgtgacatggtgagcgtggttcacgatttgcaaaaagcgatagctgaaaaagtgcagttaaaaccgggcaccagcgtggcattctccgggcagttcgagctactggagcgcgccaaccataagcttaaactcatggtgccgatgacgttgatgattatcttcgtgctgttgtatctggcgttccgtcgggtgggcgaagcgttgctgattatcagcagcgtaccgtttgcgctggtgggcggcatctggttgctgtggtggatgggctttcatctttccgtggcgacgggcactggctttatcgccctcgccggggtcgccgccgaatttggcgtggtgatgctgatgtatttacgtcacgccatagaggccgtgccgagcttgaataatccacaaacattcagcgagcagaagctggatgaggcgttatatcacggcgcggtcctgcgcgtgcgcccgaaagcgatgacggtggcggtgattatcgccggtctgctgccgattctgtggggaacgggggctggtagtgaggtgatgagccggattgccgcgccgatgattggcggcatgatcaccgcacctttgctgagcctgtttattatcccggcggcgtataagctgatgtggctgcaccgacatcgggtacggaaataaaagcaggataccccgtttaaccgtgtggattgtgtcttgcgacgatgggcactaaatgttaaaaggtgcccctcaacaaaaaagacacacaggggaaaggcgtgaaaaacgcgagtaccgtaagcgaagatactgcgagcaatcaagagccgacgcttcatcgcggattacataaccgtcatattcaactgattgcgttgggtggcgcaattggtactggtctgtttcttggcattggcccggcgattcagatggcgggtccggctgtattgctgggctacggcgtcgccgggatcatcgctttcctgattatgcgccagcttggcgaaatggtggttgaggagccggtatccggtagttttgcccactttgcctataaatactggggaccgtttgcgggcttcctctctggctggaactactgggtaatgttcgtgctggtgggaatggcagagctgaccgctgcgggcatctatatgcagtactggttcccggatgttccaacgtggatttgggctgccgccttctttattatcatcaacgccgttaacctggtgaacgtgcgcttatatggcgaaaccgagttctggtttgcgttgattaaagtgctggcaatcatcggtatgatcggctttggcctgtggctgctgttttctggtcacggcggcgagaaagccagtatcgacaacctctggcgctacggtggtttcttcgccaccggctggaatgggctgattttgagcctggcggtaattatgttctccttcggcggtctggagctgattgggattactgccgctgaagcgcgcgatccggaaaaaagcattccaaaagcggtaaatcaggtggtgtatcgcatcctgctgttttacatcggtagtctggtggttttactggcgctctatccgtgggtggaagtgaaatccaacagtagcccgtttgtgatgattttccataatctcgacagcaacgtggtagcttctgcgctgaacttcgtcattctggtagcaagcctgagtgtgtataacagcggggtttactctaacagccgcatgctgtttggcctttctgtgcagggtaatgcgccgaagtttttgactcgcgtcagccgtcgcggtgtgccgattaacagcctgatgctttccggagcgatcactagcctggtggtgttaatcaactatctgctgccgcaaaaagcgtttggtctgctgatggcgctggtggtagcaacgctgctgttgaactggattatgatctgtctggcgcatctgcgttttcgtgcagcgatgcgacgtcaggggcgtgaaacacagtttaaggcgctgctctatccgttcggcaactatctctgcattgccttcctcggcatgattttgctgctgatgtgcacgatggatgatatgcgcttgagtgcgatcctgctgccggtgtggattgtattcctgtttatggcatttaaaacgctgcgtcggaaataaggcattcacgctacatccgacaaaacgatgtcaaccatccgaaaccgctctcatccattcgatgagagcggtttttttaattactgcttaaatgcacccgccagagagcgaatatcattgccggttggcgagtaatccccgcatatccggttgtcaggtcaggatggtaaggcacctgctttacactttcgcccgtggtcagtgatggctgcgggcgaatcgtaccagatgttgtcaattaatcgtgttggcacagcgttatgactatcttttcttttatctgccagtgcacagcaaacatctcattctcacgatgaatgatgacctgctgtttattccagctaattatctgatagtccagaaaacctgcatcagtttggatctcacttgccttaaatgcgctctctttggcggaaaatgccagtgtcagcgccagagaaaaggctaaaccgcagtctgcgagtcgctcgtgttccgctggtgtaataatgttgtctgtcaattctcttgcggtttgtacagaaaaaatttcttctatatcaatgccaatcggttgacgagataccacggctaatgccgtagtcccacagtggctaatactgccgtatacctccgcaggccagacaggttggcgtagctcgccgattgcgggcacacatttatagccatattcccgcaaagcataaacagcagcgatccgtccggctaaatgctctgttttacgtttacgtccagcgtgttgcagttgtgcgtagtgcggcagccagagtaaatcctgttcacaaaaattcgccggatcgaactcaacaaaatgcagcgtatgtccggcaaaggggagggaggtatgcgtagttttcatatcgaccatattcgagactgatgacaaacgcaaaactgcctgatgcgctacgcttatcaggcctacatggtcctgcaatatattgaattggcaagatttttgtaggccggataaggcgttcacgccgcatccggcatgaacgacgcgcactttgtcaacaatctgacgttagcatcagaagtgggtgtttacgctcatataccacgtacgtcccggctcgttataggtatacgccccggcaccggcgatatagttggcccctgccgaatcgcccgtggtctgggcattacccgcacgccacaaacgtttgtcgaacagattgtccacgccgccggtcagactgacattcttcgtcacatcccaggtcgcgctcaggccaacaatgctgtaaggactaatttctttggtttccggtccaaccgctggctgacctttatagttgtacttcttcggctgctgcttgccgtaccaggtgaaggtcgtttgcatgctcaaatcttcccgtgcctgccagctcagcgtactgttcaacgtatactccgggatgatgctcaaacggtcgcccgtggttttgttttcactcttcagcatataagtgatgttattggtccacatcaccgtttcgctaaccggtacgtttaagcttccttccagaccttcaaccaccgctttcggcacgttatcccactgatagagatcggtgccgactgcgttttgccctacagccacatagcccgcttcaatcttattgcgataatcgttacggaaccaggtgacgcccgccagccacccgtcgcgtttgaactccagaccaatctctttgttgatgctggtttctgctttcaggtcatcgttaccttgcagatagcagccgcccgcgctggcatagcaaccctgacctttactgtagagaatgtagttcgggttagtctggtacaggctcggcgctttataagcacgggcgatgcccattttcagcgtgaagtcatcgcctaaaccttggcttatgttcagcgccgggctccagttattgccgacaatactgtgatgatcgaaacgcagccccggcgttacgatggtgctgtcagtcagctccatgttgttttcggcaaacaggctgaaaatttctgctttactatacgggctacggtcggtggtactcacgccatcaatagcgccaccggtattcgttccggtcagtgcctgggtgttggaacttaagtccttcatccgttgctgattccactccgtacccagcgtcagcgtctggttaacgaggaaatcaatcggcaggttaacttcgctgtgcagcatcacgtcatcaagatcgatatcgacgaaatcctgtgtcgctttttcgttaaatttcccttcggtaccgcccgccagaccttccggaatacggctgttacgggtgtgttcgtactgcacccagttgctggtggtcacgccgttatcccagccaccgttccaggtcagcgcgtagttctggcgatacagacggttggtttcatcgccatatttgctgcgggtataggaatcggagttggtattctgggtgtcgcccgcatacaggttaccctggcggctgtaacctgcttccagttccaggctttgcaatggcgcgaaatcccagcgcaccacgccattaatatctttgttgattaccccttcgcgcccggctggtaacgtcgtggcatacgttccggcacgcgcggactgatggccctggttgatatcccacgcgtcagcctgggttttgtcgaggttgccatacaaacggaagctgaattcgtcgcccagcggaccggtcaggctaaagttagtgcgtttggtggcaccttcctctttatgttctggcgcattgaaatatgcgtcccaggagccgtgccactcgccgctgccttttttggtaatgatgttaaccacgccgcccgccgcgccgttgccataacgcgcagctgccggaccacgcagaacttcaatacgttcaatcatttcaggtggcacccaggaagtatcaccacgggtatcgcgctcgccacgccagccctgacgcacgctgttacggctgcttaccggcttgccgtcaatcaaaatcagcgtgttttccggacccataccgcgaatatcaatctgtcggttattcccacgctgaccactggtggagttaccggtcaggttaacgcctggcatggtacggatgatcttgctcacatcgcgggcaaccgggtttttgcggatttcatctgcggtgatggtgctaacgccaggcgcctgtaagttctgctcggcggcggtaacgacaatagtatcgtcatgactaacaggagtatcggtcggctcttgtgcctgcgctaccccataaatccccagattgaccaacaaggccagggaatgaatcttcttgttcattgttttattcctgcatttttgccacgaattgcaactgtcgggcatggtcgtcatcaacacgacgcatcccgctaccgcgaaaacctttgatcctgaaagacacgcagtgcagttggttaattaatgtccgcgcttcccacggcgcgccattacgctattgcaaatgcaaatagttatcaataatattatcaatatatttctgcaatcaatgaaaaattgcacagtaaacatggggttatggtgtgacggcgttaaaagtaggaagtgagagctggtggcagtcgaaacatggcccggaatggcagcgtctgaatgacgaaatgtttgaggtcactttctggtggcgtgatccccaaggttctgaagaatacagcacgataaagcgcgtatgggtctacatcactggtgtgaccgatcaccatcagaacagccagccccagagcatgcagcgaattgcaggcactaacgtctggcagtggacgacacaactcaatgccaactggcgcggcagctactgctttattcccaccgaacgcgatgacattttttctgtaccatcccccgatcgcctcgaattgcgcgaaggctggcgaaaactattaccccaggcgatagccgatccgctgaacctacaaagctggaaaggcgggcgagggcacgctgtttctgcactcgaaatgccgcaagcgcctctgcaaccgggatgggattgtccgcaagcgccagaaatacctgccaaagaaattatctggaaaagtgaacggttgaaaaagagtcggcgtgtatggatttttaccaccggcgatgcaacagcagaagaacgcccgctggcagttttgctcgatggcgaattttgggcgcaaagtatgcccgtctggccagtgctgactagcctgacccatcgtcagcaacttcctcccgccgtgtatgtgttgatcgacgctatcgacaccacgcaccgcgcccacgaactgccgtgtaatgcggatttctggctcgcagtacagcaagagttattacccctggtgaaagctattgccccttttagcgatcgtgccgatcgcaccgtggttgccgggcagagttttggtgggctttccgcgctgtatgccggactgcactggcctgaacgctttggctgtgtattaagccagagtggaagctactggtggccgcatcggggcgggcagcaagagggcgtgttacttgaaaagctaaaagctggtgaagttagcgccgaaggtctgcgcattgtgctggaagcgggtattcgcgagccgatgatcatgcgggccaatcaggcgctgtatgcgcaattacaccccataaaagaatccattttctggcgtcaggttgacggcggacatgatgcgctttgttggcgcggtggcttgatgcaggggctaatcgacctctggcaaccacttttccatgacaggagttgaatatggcattcagtaatcccttcgatgatccgcagggagcgttttacatattgcgcaatgcgcaggggtaattcagtctgtggccgcaacaatgcgtcttaccggcaggctgggacattgtgtgtcagccgcagagtcaggcgtcctgccagcagtggctggaagcccactggcgtactctgacaccgacgaattttacccagttgcaggaggcacaatgagccagcatttacctttggtcgccgcacagcccggcatctggatggcagaaaaactgagtgaattaccctccgcctggagcgtggcgcattacgttgagttaaccggagaggttgatagcccattactggcccgcgcggtggttgccggactagcgcaagcagatacgctgcggatgcgttttacggaagataacggcgaagtctggcagtgggtcgatgatgcgctgacgttcgaactgccagaaattatcgacctacgaaccaacattgatccgcacggtactgcgcaggcattaatgcaggcggatttgcaacaagatctgcgcgtcgatagcggtaaaccactggtctttcatcagctgatacaggtggcggataaccgctggtactggtatcagcgttatcaccatttgctggtcgatggctttagtttcccggccattacccgccagatcgccaatatttactgcacatggctgcgtggcgaaccaacgcctgctagcccatttacgcctttcgctgatgtagtggaagagtaccagcaataccgcgaaagcgaagcctggcagcgtgatgcggcattctgggcagaacagcgtcgtcaactgccgccgcccgcgagtctttctccggcacctttaccggggcgcagcgccagcgcagatattctgcgcctgaaactggaatttaccgacggggaattccgccagctggctacgcaacttagtggtgtgcagcgtaccgatttagcccttgcgctggcagccttgtggctggggcgattgtgcaatcgtatggactacgccgccggatttatctttatgcgtcgactgggcagcgcggcgctgacggctaccggacccgtgctcaacgttttgccgttgggtattcacattgcggcgcaagaaacgctgccggaactggcaacccgactggcagcacaactgaaaaaaatgcgtcgtcatcaacgttacgatgccgaacaaattgtccgtgacagcgggcgagcggcaggtgatgaaccgctgtttggtccggtactcaatatcaaggtatttgattaccaactggatattcctgatgttcaggcgcaaacccataccctggcaaccggtccggttaatgaccttgaactggccctgttcccggatgtacacggtgatttgagtattgagatcctcgccaataaacagcgttacgatgagccaacgttaatccagcatgctgaacgcctgaaaatgctgattgcccagttcgccgcggatccggcgctgttgtgcggcgatgtcgatattatgctgccaggtgagtatgcgcagctggcgcagctcaacgccactcaggttgagattccagaaaccacgcttagcgcgctggtggcagaacaagcggcaaaaacaccggatgctccggcgctggcagatgcgcgttacctgttcagctatcgggaaatgcgcgagcaggtggtggcgctggcgaatctgctgcgtgagcgcggcgttaaaccaggggacagcgtggcggtggcactaccgcgcagcgtctttttgaccctggcactccatgcgatagttgaagctggagcggcctggctaccgctggataccggctatccggacgatcgcctgaaaatgatgctggaagatgcgcgtccgagcctgttaattaccaccgacgatcaactgccgcgctttagcgatgttcccaatttaacaagcctttgctataacgccccgcttacaccgcagggcagtgcgccgctgcaacttagtcaaccgcatcacacggcttatatcatctttacctctggctccaccggcaggccgaaaggggtaatggtcgggcagacggctatcgtcaaccgcctgctttggatgcaaaatcattatccgcttacaggcgaagatgtcgttgcccaaaaaacgccgtgcagttttgatgtcagcgtgtgggagtttttctggccgtttatcgcaggggcaaaactggtgatggctgaaccggaagcgcaccgcgacccgctcgctatgcagcaattctttgccgaatatggcgtaacgaccacgcactttgtgccgagcatgctggcggcatttgttgccagcctgacgccgcaaaccgctcgccagagttgcgcgacgttgaaacaggttttctgtagtggtgaggccttaccggctgatttatgccgcgaatggcaacagttaactggcgcgccgttgcataatctatatggcccgacggaagcggcggtagatgtcagctggtatccggcttttggcgaggaactggcacaggtgcgcggcagcagtgtgccgattggttatccggtatggaatacgggtctgcgtattcttgatgcgatgatgcatccggtgccgccgggtgtggcgggtgatctctatctcactggcattcaactggcgcagggctatctcggacgccccgatctgaccgccagccgctttattgccgatccttttgccccaggtgaacggatgtaccgtaccggagacgttgcccgctggctggataacggcgcggtggagtacctcgggcgcagtgatgatcagctaaaaattcgcgggcagcgtatcgaactgggcgaaatcgatcgcgtgatgcaggcgctgccggatgtcgaacaagccgttacccacgcctgtgtgattaaccaggcggctgccaccggtggtgatgcgcgtcaattggtgggctatctggtgagccaaagcggcctgccgttggataccagcgcattgcaggcgcagcttcgtgaaacattgccaccacatatggtaccggtggttctgctgcaacttccacagttaccacttagcgccaacggcaagctggatcgcaaagccttaccgttgcctgaactgaaggcacaagcgccagggcgtgcgccgaaagcgggcagtgaaacgattatcgccgcggcattcagcagcttgctggggtgtgacgtgcaggatgccgatgctgatttcttcgcgcttggcggtcatagcctactggcaatgaaactggcagcgcagttaagtcggcaggttgcccgccaggtgacgccggggcaagtgatggtcgcgagtactgtcgccaaactggcaacgattattgatgctgaagaagacagcacccggcgtatgggattcgaaaccattctgccgttgcgtgaaggtaatggcccgacgctgttttgtttccatcctgcgtccggttttgcctggcagttcagcgtgctcagccgttatctcgatccacaatggagcattatcggcattcagagtccgcgccccaatggccccatgcagacggcggcaaacctggatgaagtctgcgaagcgcatctggcaacgttacttgaacaacaaccgcatggcccttattacctgctggggtattcccttggcggtacgctggcgcagggtattgcggcgcgactgcgtgcccgtggcgaacaggtggcatttcttggcttgctggatacctggccgccagaaacgcaaaactggcaggaaaaagaagctaatggtctggacccggaagtgctggcggagattaaccgcgaacgcgaggccttcctggcagcacagcagggaagtactagtacggagttgtttaccaccattgaaggcaactacgctgatgctgtgcgcctgctgacgactgctcatagcgtaccgtttgacggtaaagcgacgctgtttgttgctgaacgcacacttcaggaaggtatgagtcccgaacgcgcctggagcccgtggatagcggagctggatatctatcgtcaggattgtgcgcatgtggatattatctctccagggacgtttgaaaaaattgggccgattattcgcgcaacgctaaacaggtaaattaatattatttataaacccataattacagaaaataattatgggttttttatttgtttgatttataggtttgatgaatatttctcttaaatagagtgaatgttgcattcagtggaaggaatttacaaacttcagcttcggataattatcaccaactggtaaagtgagcgccgtggagatttccccctattggactcattttcaggttataccccatgagtagtctgaatattaaacagggaagtgacgctcattttcccgattatcctctggcgagccccagtaataatgaaattgatttacttaatctaatcagtgttttatggcgggccaaaaaaacggtcatggcggtcgtttttgcgtttgcctgcgcaggcttgctgatctctttcatcctgccgcaaaaatggaccagcgcggcggttgtcacgcctccagaacctgttcagtggcaagagttggagaaaagtttcactaagcttcgtgtgctggatctggatatcaaaattgatcgtacagaagcatttaacctgtttatcaagaagtttcagagcgttagcttgctggaagagtacctgcgtagtagtccttatgtgatggaccaattaaaagaggcgaaaatcgacgaactggatttgcatcgcgcaattgtcgcattgagcgaaaaaatgaaagcggttgatgacaatgccagtaagaaaaaagatgaaccgagtctgtatacctcctggacgctaagttttaccgcgccaaccagtgaagaggcgcagaccgttttgagcgggtatatcgattatatctctacgttggtggtgaaagagagcctagaaaacgtccgtaataaactggagatcaaaacccagtttgaaaaagaaaaactggctcaggatcgcattaaaacgaaaaatcaacttgatgcaaacattcagcgcctcaattatagtctcgacattgccaacgcggcaggaattaaaaagcccgtttacagtaatggtcaggccgttaaagatgaccccgatttttctatttctctcggtgcagacggtattgaacgcaaactggaaatagaaaaagcggtcactgacgttgcggaactgaacggtgaattacgtaatcggcagtatcttgtcgagcaattaacaaaagcacatgtcaacgatgtgaattttacgccgtttaaatatcagttaagcccgagtttgccagtgaaaaaagacggtccgggtaaggcgattattgtgatcctttccgcgttgatcggcgggatggtggcttgtggtggcgtgctgttgcgctatgcgatggcatccagaaaacaggatgccatgatggcagaccacttagtttaactatttgcggtactaggtgccgttcgtccgagcggcaccacaagcggcgttccggcaactggatcgtcaatgatcatgcagcgcagaccataaatgcgctcaatcagttcagcagtgacaatctccttcggcgctccctgagcaacaattttcccttcccgcaatgcaatcaaatggctggcgtaacgacaggcctgattaagatcgtgcagcaccgccgccagggtatagcctttttcgcggttcagttcgcttaacaactccagcaaatcaatctgatgactgatatccagccaggtcgtgggttcgtcgagcagcataattgccgtttcctgggccagcaccatcgcgatccacgctcgctggcgttgtccgccagaaagggtatccacgctttgatctgccagatgagttattcccgtggcctgcattgctttcgttaccgcttcttcatcctctttgcgccagcgggtaaacagcggttgatgcggataacgtccacgcgccaccagctcctgcacggtgatatcgcccggcgtggtagcattttgcgccaacagaccaatccggcgtgcaacctctttactggcgtaatgttgaatgtgctcgccatccagccagacatgcccatgagcaggcgtcatcaggcggcttaaggtacgcagtaacgtggatttaccgcagccatttggcccgataattgccgtgaagtgaccatcaggtatttctacagtcagattttccgcaacggtatatttgccatatcccagggttaactgttcgccgcgcaaacgggctacactttcggtcattttttgcgagactcctgaattaacaagacgataaggtaaataccgccgaggctgacggtaacgacgccaaccggaagttgatacggcataaacagttgttgggcgcagagatcggccgccagcagtaacagcgccccgcatagcgccgcctgggttagcccccagcgagcggtgccgctaatgcgtcgggcaatgtgcggtgcgactaaagcaataaaggaaatcggcccggcaagcgctgttgccgcagcggtaagcaccactgcaaccagcatcattaacagacggctacgttcgacgctgacgcccagcgcacacgcggtatcatcgcccatttccagcaagcgcatccggcgtaccagtaaggcggcggcaatgagcatcaatataatgatgggtgcggaagggctggtttttgcccacgtcaggccgttgaggcttccggcattccacaaacctgctgttagcgccgtttctaaagacgctttcagcaacagccaggtattaaaggccaccagcatggcgcgaacgccgataccgataataatcaaccgaaaggtgtcgatgccgttgcgccaggcgagcagccagaccagcaggctagtgacaatgccgcccaccattgcactcagcgcgatagccgtcaggtcctgaccaaacagcaccatcgccaccagcacgccgctccacgccccggtgttaaagcccattacgtcagggctgccgagcgggttacgcatcaggctctgaaaaatcgcgccactgacgcccagtgctgcgccaatcaacagcgccatcagcacgcgtggtaaacgccattcggtgaccaccatcgtcatactgcgcggcgcatcgcccatcagcgcggcgaatacctggctggtttccagcgtgacggcaccgctgcgtaatccccagatacctgcaaccacacaggcggaaaccagcagcaaacaggtgatgagtaatcggcgagagacgtaaatcatgcaccacctcgcgttttacgtcgcacgaggaagatcagcaccggtgcaccaataaacgcactgaccacagaaacgcgcagttcgccgggcacaatcacccgcccgatgatatcggcaaacagcagcagggcaggggtagcaagtagcgtgacgggcaggctccagcgatgatcggcacccaccagccaacgcgccatatgcggcatcatcaggccaataaaggcaatcgggccaactattgccgtcgcactaccacaaagcacggtaatcgccagcagaccaatcaactgtgtgcgcgccacgcgactgcccagcgccgtcgcggtgtcgctgccgaggctcaaactgttcagcgcgcgactcagtaatagcgcagttgctccggcgatcagcaccgggatcagcaccacttttaaggtatgtagattgcgaatatccaggctaccggcttgccagaaacgcaactgatcgtagacgtcaggattaagcagggcgatgccgctggtcagtccttccagcaccgccgccagcgccacgcccgccagggttaaacgcaccggacttaactgcccgccgccctgactgccggtaaaggcaacaatcaaactggccaccagcgccccggcgaaggccatcgccagttgttcctgcgcggaagagtaaccaaacagcgccgcacccagcacaatggcaaagctggctccggcgttcacgccaagcaagccggggtcggcaagtgggtttcgggtgagggtttgcattaacgccccggcaaggccaagcgcgccgcctgccagtaaaccggcaagggtacgcggcagccgcgcgtcgagcacgatggtgcagtcggcgctctggcaggtgccggagaaggcctccagcactacggaagcggggagactttttgccccaatgagcaggcttaatgccgtcgcgataatcagtaataacagcaatccgggcacggcaatggcgcgtgtcacggcaacagaaccagacatacgaacttccatgataatgaaattaattatcgttatcgatcttatttggatatgttagcatgtgcagcctaagaataggtatttaaaatatttgatggcaaggcattgtaatgaataaacaatcctggctgcttaacctcagcctgttgaaaacgcacccggcgtttcgcgcagtattcctcgctcgtttcatcagtattgtgtctctgggtttgctcggcgtcgcggtgccggtgcagatccagatgatgacacattccacctggcaggtggggcttagcgtgacgctgaccggcggcgcgatgtttgttggcctgatggtcggcggtgtgctggcggatcgctatgagcgcaaaaaagtgattttgctggcgcgcggcacctgtggcattggcttcattggactgtgccttaatgcactgctgccggagccgagtttgctggcaatctatttacttggtttatgggatggttttttcgcaagccttggcgttacggcgctattggcggcgacaccagcactggtagggcgtgaaaacttaatgcaggccggggcgatcaccatgttgaccgtgcgtctggggagcgtgattagccccatgattggcggtttattgctggcgaccggtggcgtagcctggaactacgggctggcggcggcgggcacgtttattaccttgctaccgttgttaagccttccggcgttgccaccgccaccgcagccgcgtgagcatccgttgaaaagtttactggcaggatttcgttttctgcttgccagcccgctggtgggcgggattgcgctgctgggtggtttattgacgatggcgagcgcggtgcgggtactgtatccggcgctggctgacaactggcagatgagtgcggcacagattggttttctctacgcggcgatcccgctcggcgcggctattggtgcgttaaccagcgggaagctggcacatagtgcgcgaccagggttattgatgctgctctccacgctgggaagcttcctcgccattggtctgtttggcctgatgccgatgtggattttaggcgtggtttgtctggcgctgttcggctggttgagtgcggtcagcagcttgctgcaatacacaatgctgcaaacgcaaaccccggaagcgatgttagggcggattaacggtttgtggacggcgcagaacgtgacgggcgatgccataggcgcggcgctgctgggtggtttgggcgcgatgatgacaccggttgcttccgcaagcgcgagcggttttggtttgttgattatcggcgtgttgttattgctggtgctggtggagttgcgacattttcgccagacgccgccgcaggtgacagcgtccgacagttaatgcttaaaacagcgccttaagcctatccagcacttgcatggcgctgtagtaatccagacggaacgtctcggttcccagcgcataaacctgcttgttttgtactgcaggcaggtgcgcgagcagcggattagcataaatagcatcggcatctttctgatcaccggcgaacaggaatagactctcgccatttaaccctgcagccagattttccccaccaagctgaatgatgtcatggcgtttaccctgactttggctggcatttaaccctgcgggtaacttcgccagcgtaaagccgagttgttccagcatctgcccttgtgcactttctggcgtccagagattggcactgtgtgcagcggcagtatagacaatggcagtgaccggctgcggcggtaatttgatttgctctttcgccgccgccagttgcttatcaaactgcgcaatccgctctgccgcttgtttctcatgcccggtaatttcgccaagttgcgttaacaggctctgccagcttttgtcgtcgtaattgatgattaatgtcggggcgatggtggaaagctgatcatacagtgccagcgcgctatccccgccggttgcgctaattaaaatcagatccggcatttgcgcggcaacggcttcggcgctcggttcgccgatatagagccgttgcagtttgcgttctttcgccaccttgctccactggcgtaaaaagccctggtcatccgcgacgcggttattcggcgtggtcgcgccgctggcgatcaccggagcatcaatcgccagcagactgccggtcagggtgacgctggtggaaacaatacgctgcggctggctttccagtgtatgtgtgccacggctgtcagtaatctgacgcggccagtcagcggcctgaactgcggctattccactaagcaaaagtcctgttaatagaagggcgttgcggtagagcggggcgagtctcacaaatcagcttcctgttattaataaggttaagggcgtaatgacaaattcgacaaagcgcacaatccgtcccctcgcccctttggggagagggttagggtgaggggaacagccagcactggtgcgaacattaaccctcaccccagccctcaccctggaagggagagggggcagaacggcgcaggacatcacattgcgcttatgcgaatccatcaataatgcttctcattttcattgtaaccacaaccagatgcaaccccgagttgcagattgcgttacctcaagagttgacatagtgcgcgtttgcttttaggttagcgaccgaaaatataaatgataatcattattaaagcctttatcattttgtggaggatgatatggatacgagtctggctgaggaagtacagcagaccatggcaacacttgcgcccaatcgctttttctttatgagcccgtaccgcagttttacgacgagtggatgtttcgcccgcttcgatgaaccggctgtgaacggggatagccccgacagtcccttccagcaaaaactcgccgcgctgtttgccgatgccaaagcgcagggcatcaaaaatccggtgatggtcggggcgattcccttcgatccacgtcagcctagcagcctgtatattcctgaatcctggcagagcttctcccgtcaggaaaaacaagcttccgcacgccgtttcacccgcagccagagcctgaatgtggtggaacgccaggcaattccggagcaaaccacgtttgaacagatggttgcccgcgccgccgcacttaccgccacgccgcaggtcgacaaagtggtgttgagtcggttgattgatatcaccactgacgccgccattgatagtggcgtattgctggaacggttgattgcgcaaaacccggttagttacaacttccatgttccgctggctgatggtggcgtcctgctgggggccagcccggaactgctgctacgtaaagacggcgagcgttttagctccattccgttagccggttccgcgcgtcgtcagccggatgaagtgctcgatcgcgaagcaggtaatcgtctgctggcgagtgaaaaagatcgccatgaacatgaactggtgactcaggcgatgaaagaggtactgcgcgaacgcagtagtgagttacacgttccttcttctccacagctgatcaccacgccgacgctgtggcatctcgcaactccctttgaaggtaaagcgaatagccaagaaaacgcactgactctggcctgtctgctgcatccgacccccgcgctgagcggtttcccgcatcaggccgcgacccaggttattgctgaactggaaccgttcgaccgcgaactgtttggcggcattgtgggttggtgtgacagcgaaggtaacggcgaatgggtggtgaccatccgctgcgcgaagctgcgggaaaatcaggtgcgtctgtttgccggagcggggattgtgcctgcgagcagtccgttgggtgagtggcgcgaaacaggcgtcaaactttctaccatgttgaacgtttttggattgcattaaggagcgaggatgagcattccattcacccgctggccggaagagtttgcccgtcgctatcgggaaaaaggctactggcaggatttgccgctgaccgacattctgacgcgacatgctgcgagtgacagcatcgcggttatcgacggcgagcgacagttgagttatcgggagctgaatcaggcggcggataacctcgcgtgtagtttacgccgtcagggcattaaacctggtgaaaccgcgctggtacaactgggtaacgtcgctgaattgtatattacctttttcgcgctgctgaaactgggcgttgcgccggtgctggcgttgttcagccatcagcgtagtgaactgaacgcctatgccagccagattgaacccgcattgctgattgccgatcgccaacatgcgctgtttagcggggatgatttcctcaatactttcgtcacagaacattcctccattcgcgtggtgcaactgctcaacgacagcggtgagcataacttgcaggatgcgattaaccatccggctgaggattttactgccacgccaagtcctgctgatgaagtggcctatttccagctttccggtggcaccaccggcacaccgaaactgatcccgcgcactcataacgactactactacagcgtgcgtcgtagcgtcgagatttgtcagttcacacaacagacacgctacctgtgcgcgatcccggcggctcataactacgccatgagtagcccaggaagcctgggcgtctttcttgccggaggaacggttgttctggcggccgatcccagcgccacgctctgtttcccattgattgaaaaacatcaggttaacgttaccgcgctggtgccacccgcagtcagcctgtggttgcaggcgctgatcgaaggcgaaagccgggcgcagcttgccagcctgaaactgttacaggtcggcggcgcacgtctttctgccacccttgcggcgcgtattcccgctgagattggctgtcagttgcagcaggtgtttggcatggcggaagggctggtgaactacacccgacttgatgatagcgcggagaaaattatccatacccagggttacccaatgtgtccggatgacgaagtatgggttgccgatgccgaaggaaatccactgccgcaaggggaagtcggacgcctgatgacgcgcgggccgtacaccttccgcggctattacaaaagtccacagcacaatgccagcgcctttgatgccaacggtttttactgttccggcgatctgatctctattgatccagagggttacatcaccgtgcaggggcgcgagaaagatcagattaaccgtggcggcgagaagatcgctgccgaagagatcgaaaacctgctgctgcgccacccggcggtgatctacgccgcactggtgagcatggaagatgagctgatgggcgaaaaaagctgcgcttatctggtggtaaaagagccgctgcgcgcggtgcaggtgcgtcgtttcctgcgtgaacagggtattgccgaatttaaattaccggatcgcgtggagtgtgtggatagtcttccgctgacggcggtcgggaaagtcgataaaaaacaattacgtcagtggctggcgagtcgcgcaagtgcctgaaggagagaacacgatggctattccaaaattacaggcttacgcactgccggagtctcacgatattccgcagaataaagttgactgggcctttgaaccgcaacgtgccgcgttgttaatccatgatatgcaggactattttgtcagcttctggggcgagaactgcccgatgatggagcaggtgatcgcgaatattgctgcgctgcgcgactactgcaaacagcacaatatcccggtttattacaccgcccagccgaaagagcagagcgatgaagatcgggcgctgttgaatgatatgtgggggccgggcctgacccgcagcccggaacagcaaaaggtggtggatcgcctgacgccagatgccgacgacacggtgctggtgaagtggcgctacagcgcgtttcatcgttctccgctggagcaaatgctgaaagagagtggacgtaaccagctgattattaccggggtatatgcccacattggctgtatgaccaccgcaaccgacgcatttatgcgcgatattaaaccgtttatggtggcggatgcgctggccgatttcagccgtgacgagcatttgatgagcctgaaatatgtggccggacgttctggccgggtggtgatgactgaagaattactgccagcacctatccccgccagcaaagcggcgctgcgtgaggtgatcctgccgttgctggacgagtccgatgaaccgttcgatgacgacaacctgatcgactacggtctggatagcgtgcgcatgatggcgctggcggcgcgctggcgcaaagtgcatggtgatatcgactttgtcatgctggcgaaaaacccgaccatcgacgcctggtggaagctactctcccgcgaggtgaaataatggatttcagcggtaaaaatgtctgggtaaccggcgcaggtaaaggtatcggctacgccacggcgctggcgtttgttgaggcgggagcgaaagttacaggttttgatcaagcgttcactcaggagcaatatccctttgcgaccgaagtgatggatgttgccgacgctgcgcaggtcgcgcaagtgtgtcagcgactgttagctgaaacggagcgactggacgcgctggtcaatgcggcgggaattttacgcatgggcgcgaccgatcagctcagtaaagaggactggcagcagacttttgcggttaacgtcggcggtgcgtttaacctgttccagcaaaccatgaaccagtttcgccgtcagcggggcggggcgattgtcactgtggcgtccgacgccgcgcacacgccgcgtattggcatgagtgcttatggcgcaagcaaagcggcgctgaaaagcctggcgttgagcgtcgggctggaactggcgggtagcggcgtgcgctgtaatgtggttagccctggctccaccgacaccgatatgcaacgcacgctgtgggtgagcgatgacgccgaagaacagcgtattcgcggctttggcgagcagtttaaactcggcattccgctggggaaaatcgcccgtccacaagagatcgccaacacgattttgttcctcgcctctgacctcgccagccatattaccctacaggatattgtggtcgatggcggcagtacgctgggggcataagcatgatctggaaacgccatttaacgctcgacgaactgaacgccaccagcgataacacaatggtggcgcatctgggaattgtgtatacccgtctgggcgatgatgtgctggaagccgaaatgccggttgatacccgtactcatcagccgttcggtttactacatggcggcgcgagcgcggcgctggcggaaacgctgggaagcatggccggatttatgatgacccgcgacggacagtgtgtggtaggcacagaacttaatgcaacacaccatcgcccggtgtctgagggaaaggtacgcggcgtctgccagccgctgcatcttggtcggcaaaatcagagctgggaaatcgtcgttttcgatgaacaggggcggcgttgctgcacttgtcggctgggtacggcagttttgggatgaacccgacagaattagatgagattgcaggaaaactcggttaacggagtgatcgagttaacattgttaagttaaatattggtttcaactccgatttacatggttgctgtgttgttaaattgtacaaagatgttatagaaacaaaatgtaacatctctatggacacgcacacggataacaactatgaacaaaagtgggaaatacctcgtctggacagtgctctctgtaatgggagcatttgctctgggatacattgctttaaatcgtggggaacagatcaacgcgctgtggattgtggtggcgagcgtctgtatctatctgatcgcttaccgtttttatgggctgtatatcgccaaaaatgtgctggcggttgacccgacgcgtatgacgccagcggtgcgccataacgacgggctggactatgtgccgacggacaagaaagtgctgttcggtcaccattttgcggccattgccggagcaggtccgctggtggggccggtactggcggcgcaaatgggctacctgccggggatgatctggctgctcgctggggtggttctcgccggtgcggtgcaggatttcatggtgctgtttgtttctacgcgccgtgacggtcgcagcctgggtgagctggtcaaagaagagatggggccaaccgccggggtgattgcgctggtggcctgctttatgatcatggtcattatccttgcagtgctggcgatgatcgtggtgaaagccctgactcatagcccgtggggaacatataccgttgcgttcaccattccgctggcgctgtttatggggatctacctgcgctatctgcgtccggggcgtattggcgaagtgagcgtcatcggtctggtattcctgattttcgccattatctctggcggctgggtggcagaaagtccgacctgggcaccgtactttgactttaccggcgtgcagttgacctggatgctggtgggttacggttttgtggcggcggtgctgccggtgtggttactgctggccccgcgtgactacctctctaccttcctgaaaatcgggactatcgtcggtctggcggtaggcattttgattatgcgcccgacgctgaccatgcctgcgctgaccaaatttgtcgatggcactggcccggtatggaccggtaacctgttcccgttcctgtttatcaccatcgcctgtggcgcggtgtctggcttccatgcgctgatctcttctgggaccacgccgaagatgctggcgaacgaagggcaggcgtgctttatcggctacggtgggatgttaatggaatccttcgtggcgattatggcgctggtttccgcctgtatcatcgatccgggcgtgtattttgccatgaacagcccgatggcggtgctggctccggcagggacggcggatgtggtcgcttctgccgcgcaggtggtgagtagctggggctttagcattacaccagatacgctaaaccagattgccagcgaagtgggtgaacagagcatcatttcccgtgcgggcggtgcgccgacgctggcggtggggatggcctacattctgcacggcgcgctgggcggcatgatggatgtggcgttctggtatcacttcgccattttgtttgaagcactgtttattctgacggcggtggatgcaggtacgcgtgctgcgcgctttatgttgcaggatctgctgggcgtggtgtctcctggcctgaagcggaccgatagtctgcctgctaacctgctggcaacagcgctgtgcgtactggcgtggggctacttcctccatcagggcgtggtcgatccgctgggcggcattaacactctgtggccgctgtttggtattgccaaccagatgctggcagggatggcgctgatgctctgtgccgtggtgttgttcaagatgaaacgtcaacgttacgcctgggtggcgctggtaccaacggcctggctgctgatttgtaccctgaccgcaggctggcagaaagcgtttagcccggatgcgaaagtcggcttcctggccattgctaataagttccaggcaatgatcgacagcggcaatattccgagccagtatactgagagtcagctggcgcaactggtgttcaacaaccgtctggatgccgggttaaccatcttctttatggtggtcgtggtggttctggcactgttcagcattaagacggcacttgcggcattgaaagatccgaagccaacggcgaaagaaacgccgtatgaaccaatgccggaaaatgtcgaggagatcgtggcgcaggcaaaaggcgcacactaaagtcagagtgagggggggatgttggcgaatgttggcttagtgcccagggttccctctcaccctaaccctctccccggtggggcgaggggactgaccgagcgcgttgatagcatttgtaggccggataaggcgttcacgccgcatccggcactctttcagcaacatggttagcggaggccaagatgtttgatagtctggcaaaagccggaaaatatttaggtcaggcggcgaagctgatgattggtatgcctgattacgacaactatgtcgaacatatgcgggttaaccatcccgatcaaacgccgatgacctacgaagagtttttccgtgagcggcaggacgcgcgctacggtggaaaaggcggcgcgcgctgctgctaaatttgtacgtcaggctttaaagctttccacttttttgaacgctgcacgcaacgtatctggtgtcagcgtgactggcaggtaatgaatggactccaccggacgcagggtgtgggcaatcactttgtcgatctccgcctgattattgatatccacttccagctccgccagtgtagtcggcagatgaaaacgctgatacgctccagttaattgcgccagcacatcatcctgacccagcaaggcgctttgcaccagaattccgtaggcgactttggtgccgtggagaaacttctcggtttgcggcagcacggtcagaccgttatgcacggcatgagctgccgccacacgcgtaaaacgatcgcccagaccaccaaccatcccaccaccagcaataatagcatccaccacatcgcaaaaactttgcgttaactgttgattttgctgatcgctcagcgcctgttcgctactgtttaacaagacgtcgcgaatggcttgcgcattattgatccccagtcgcacggttagcggcaacgtttctggttgcggagccagcaccaccgcttcataccatttcgccagcgtgtcaccgatccccgccagcagatattgttgcggtgcattgaggataatctccggttccaccagcaccataaaattggcgtcgtcgaaaatctcataatgcagcgcctgtccggcatcattataccagacggagagcggtgtccaggcggcgcaggtggcggcgatcgtcggaacggcaacaaacggcagaccgagacggcgggcgagggctttcgcggtgtcgagcagtgcaccgccaccgacgccaatcaccacgctgcggtcgtcaccggactcagccgccagttgttgtacatcgctttcgctgcaatgaccgcgaaacaaaatatgctttgcccctggcagtccaaacgctggcggaagtttggtttgcgccgcagcaatggcgcgtttgccgtagatccacaccgcgcgagaaagttgttcatcagtgaaaaaatcgtgcaggtgattgaaacttcctggatgactaaagtagttagccgggccgacgaccacgcggataggattgtgaggcatgttgtgttgtccttattgttttatttagacatctaaacgtcttgattgccaaatactagcatcgtgttatagtgccttcaacacgcaacttcgtcaggtacaataaaaatgacaaataaccctctgattccacaaagcaaacttccacaacttggcaccactattttcacccagatgagcgcgctggcgcagcaacaccaggcgattaacctgagccaaggctttcctgattttgatggtccgcgctatttacaggagcggctggcgcaccacgttgcacagggggcaaaccaatacgcgcccatgaccggcgtgcaggccttgcgcgaggcgattgctcagaaaacggaacgtttgtatggctatcaaccagatgccgatagcgatatcaccgtaacggcaggggcgacggaagcgttatacgcggcgattaccgcactggtgcgcaatggcgatgaagtgatttgttttgatcccagctatgacagttacgcccccgccatcgcgctttctgggggaatagtgaagcgtatggcactgcaaccaccgcattttcgcgttgactggcaggaatttgccgcattattaagcgagcgcaccagactggtgatcctcaacactccgcataaccccagtgcaactgtctggcagcaggctgatttcgccgctttgtggcaggcgatcgccgggcacgagatttttgtcattagcgatgaagtctacgagcacatcaactttagtcaacagggccatgccagtgtgctggcgcatccgcagctgcgtgagcgggcagtggcggtttctagttttggcaagacctatcatatgaccggctggaaagtgggttattgtgttgcgccagcgcccatcagcgccgaaattcgcaaggtacatcagtatctgacctttagcgtgaataccccggcacagctggcgcttgctgatatgctacgtgcagaacctgagcattatcttgcgttaccggacttttatcgccagaagcgcgatattctggtgaatgctttaaatgaaagccggctggagattttaccgtgtgaaggtacatactttttgctggtggattacagcgcggtttctaccctggatgatgttgagttttgccagtggctgacgcaggagcacggcgtagcggcgattccgctgagcgtgttttgcgccgatcccttcccacataaactgattcgtctctgttttgccaagaaggaaagcacgttgctggcagcagctgaacgcctgcgccagctttaattatttaaccgtccaggcgcgggaatattgacggtcggcaaacaactcttgcaggccgttaatttgcttcaggcgcagcacttcgtcgctgtccattcccagctctttgccaattttattatcgtcccatcccaactggctaagttcacggacgatttcgctcatggcggtgatttgatggcgtccacgagcgcgattatgacgaatagtcgcggcgatgcgttgattacgcgtaccttccagacaggtcaccggcaaataaccttttaagcgtaattttaaactactactgcctttaccaatttcatggcggtgaaaaccatccacgatttccatggcatttttatccgtatgtgtgaccacaatgggttgggtaaaaccatctatttcaatggatttttgcagcagttttttttcgggtggtgccacgttgtttgggttgtaatcattaggcataagttggctgtttttaacccacagaacgcaatccactggctcttcacgaaaggggctaacctgatggatcgccatgcggatttcattaatcgctttgatgcgatcatcttccggcaagctggcgagaaattgcgttaaatcctgcgttaatcgttgttgcatagtatcccccattcctgacgttttccttttatccgttcgttataacgctgatagttcttgctttttgtggggctaaaacttaatgcccgacaccagtaatcgttattgagtaaaactttgcatatccgccgccaggaggggatatctttcgcgccaatgtccccttgctgggtttgtggaacctcgatgccttttttctgataccagtgcaaataaatggcgattttattgcggtaatgctcagctgttttttccggcatgctattgagcagcaataatgcatattcttgccagtctaaatgttctggcttgaggattttccgatgcccatagaaatgattgtcatgtccggcgtaaatgccgccactttttaccccgctgactcgtgcgcacatagcagcccagcgatccggttcgataacgtgatagagccataatccttgtcgttgctccgggccaaaaggttcgcaaattcgcatatgacgcagaggaacgcctgcctgatacattaggttatacagtgggttgcagagactttgatgatttgcataccaggtccagatatcagccactttccagtcgtaaatggggtaaatgtaccagctatgaccgcctggtgcggccgtagtccagggtttatcgtcggcaaaacgttgtttatttaaactggcgatggcgacaaaacggttgtaggactcatccgcacggatgccgatcatcatcgccgccggacgtttttgactaaaccattcggcaaactcacgtacaaattgttcgaaggtcatgcctggctggtaaaagcagaaaaagtcagggtcggttatcgcatcttggggaggttgacgtacccattcgacatcaggttcccagcactgccattcgggttggtattgactaagggaattttgcgtcgtaagcgggagcgcaacccagtaaaactcttcgatgacatcggtgtacaactcgcgcagggactgaacatagttaatggtgcaagagaattgcgcctcccagtcgataaacaaaacgcagatttttttgcccatttgtcgggcaagttcggctgtcagatgcagcattaaaccagagtctttgccgccagaaaaactgacacaaacgcggggtagggtgttgagtgtccaggtaatacgctctcgtgcagcttccagaatattgagcggaagaggaattttataaatagacatctgaagacgctctctgaacgttacagggtgatcagtgagataagtctgttaattataaagtaaacactgtaaagcagagtgttttatttttcattcgcgctgtgaataaatagatgaaagttatagtagctgtctgtagttatatatcaaaaactctcatttagacggtcaataaatcgggagaacaccaaattatttaaagaagatttattataggaaatgtaaagctttatactaggtaacggatgttctagttttatctcttttaagttaagaaagtcacggtaggaattataaagttcataggggactattcccagtaaatctgtaactgcaatgctattaatgattgtcagcaaagaggaaccacgaaaactgattttgcgattcataaatctctcgtctatttccatttgaatatcatcaacccctgcacttttagatattaattgggtgaactcttctgccataatttgttcataagtgctattgtcagtaattcgtggatgcctattactacaaattagagtattgcgaatcgtatgcaatggcatgcaaatgacggaacggctgatcactggcatttgggtgatcaccagatcggctttgcggtgaaccaacagttcttcagcattctctgcactcatgaggatatcatggcactcaatctcgacagaggaatcttgccgtaggcagcggatcagcatactattattagagcaagaaatgagctgagggccgtagataataaagtttttctttagttcggacttattgactatattaattgtttgttcaaggcctctgagatttttctcaagatggtgatgcagatttaaccctgttgtcgtcggcgcgataccttttccactgcgaatgaataaagggtcattaaattgcgcacgtaagcgttgtaagctctggctcacggcacttggggtgatatatagactttcagcagctttgctaatgcttaaatgctggtaaatacactcaaatatgacaagaagatttaagtcgaactttttcaagtcgtagagattggccatacactactccggttatatttttcttccatgatatattcacttaatcaatgttttttgcgtatatatttttattgattatgtttttttgcttaactcaggattaagtttttctaaaatagcacagccacttagggcagagcgagcaattcatgcttttttaggatggttgaaaagcagggatatagttcaaccatccatgaattaccttttatttattccccataatgatattaagcgttttctgatcgggcaaccccacggcctgttgtagcgtattttccttactcatgtaatagatagccggcgtgacatttgcccccagatcgtccatcagtttctcattgtcacttaacactttcatttgctctgtacttacgtttgcaggcacgtttagcttaagcttgccaccagaggcttcatattgttgccaggtttttgcgggatctttggaggcaagaattgccgctgctgtcgccgggctttctggcttgataaccccaaccaacaatgttcttaattgcactttgccagaatctacccacgggcgcgcctgctgccagaactgtttacaatatgggcagaacggatcggcgaagacgtagacaatgaccggcgcatcttttttaccgtcgaggagccagtgggattgttccatccgttgccacatttcgcgtccggctggtgcgtaaatttctttttcgataagtgtgttactcaggttttcacctttctcgttgtacatgtaaccagagatagcgtgcttaccatctggagtcaggtagatggtgacgcccatatcctgacactttccgagataacctttcattcctccgggggcatcgaatgttttgatgattgtaatgccctgtttttcaatcgcttttactggagcaggaagttcctctgcgaaggcgattgcaggaagcagagccagtaaaagtatcttttttaacattaatttgtccttttcagtcagtgcaaaagtcgagtaaaaggcataacctatcactgtcataggtaagagcttagatcaggtgattgccctttgtttatgagggtgttgtaatccatgtcgttgttgcatttgtaagggcaacacctcagcctgcaggcaggcactgaagataccaaagggtagttcagattacacggtcacctggaaagggggccattttactttttatcgccgctggcggtgcaaagttcacaaagttgtcttacgaaggttgtaaggtaaaacttatcgatttgataatggaaacgcattagccgaatcggcaaaaattggttaccttacatctcatcgaaaacacggaggaagtatagatgtccttgattaacaccaaaattaaaccttttaaaaaccaggcattcaaaaacggcgaattcatcgaaatcaccgaaaaagataccgaaggccgctggagcgtcttcttcttctacccggctgactttactttcgtatgcccgaccgaactgggtgacgttgctgaccactacgaagaactgcagaaactgggcgtagacgtatacgcagtatctaccgatactcacttcacccacaaagcatggcacagcagctctgaaaccatcgctaaaatcaaatatgcgatgatcggcgacccgactggcgccctgacccgtaacttcgacaacatgcgtgaagatgaaggtctggctgaccgtgcgaccttcgttgttgacccgcagggtatcatccaggcaatcgaagttaccgctgaaggcattggccgtgacgcgtctgacctgctgcgtaaaatcaaagcagcacagtacgtagcttctcacccaggtgaagtttgcccggctaaatggaaagaaggtgaagcaactctggctccgtctctggacctggttggtaaaatctaaatttccttcgtctttcacgccatagcggcgttggcgtcgcccgctcaccccggtcacttacttgtgtaagctcccggggattcacaggctagccgccttgctctgacgcgaaatacttcggaaattcacctaattcttcgggtgctgcggcacccgattttcttccccgcaccatgatgcaagctgcatccaggtagccgcagaggccgcttgcatgatgatgtttaaagcccaggagataaacatgctcgacacaaatatgaaaactcaactcaaggcttaccttgagaaattgaccaagcctgttgagttaattgccacgctggatgacagcgctaaaagcgcagaaatcaaggaactgttggctgaaatcgcagaactgagtgacaaagtcacctttaaagaagataacagcttgccggtgcgtaagccgtctttcctgatcaccaacccaggttccaaccaggggccacgttttgcaggctccccgctgggccacgagttcaccagcctggtactggcgttgctgtggaccggtggtcatccgagcaaagaagcgcagtctctgctggagcagattcgccatattgacggtgattttgaattcgaaacctattacagcctctcttgccacaactgcccggacgtggtgcaggcgctgaacctgatgagcgtactgaacccgcgcatcaagcacactgcaattgacggcggcaccttccagaacgaaatcaccgatcgcaacgtgatgggcgttccggcagtgttcgtaaacgggaaagagtttggtcagggccgcatgacgttgactgaaatcgttgccaaaattgatactggcgcggaaaaacgtgcggcagaagagctgaacaagcgtgatgcttatgacgtattaatcgtcggttccggcccggcgggtgcagcggcagcaatttactccgcacgtaaaggcatccgtaccggtctgatgggcgaacgttttggtggtcagatcctcgataccgttgatatcgaaaactacatttctgtaccgaagactgaagggcagaagctggcaggcgcactgaaagttcacgttgatgaatacgacgttgatgtgatcgacagccagagcgccagcaaactgatcccagcagcagttgaaggtggtctgcatcagattgaaacagcttctggcgcggtactgaaagcacgcagcattatcgtggcgaccggtgcaaaatggcgcaacatgaacgttccgggcgaagatcagtatcgcaccaaaggcgtgacctactgcccgcactgcgacggcccgctgtttaaaggtaaacgcgtagcggttatcggcggcggtaactccggcgtggaagcggcaattgacctggcgggtatcgttgagcacgtaacgctgctggaatttgcgccagaaatgaaagccgaccaggttctgcaggacaaactgcgcagcctgaaaaacgtcgacattattctgaatgcgcaaaccacggaagtgaaaggcgacggcagcaaagtcgttggtctggaatatcgagatcgtgtcagcggcgatattcacaacatcgaactggccggtattttcgtccagattggtctgctgccgaacaccaactggctcgaaggcgcagtcgaacgtaaccgcatgggcgagattatcattgatgcgaaatgcgaaaccaacgtgaaaggcgtgttcgcagcgggtgactgtacgacggttccgtacaagcagatcatcatcgccactggcgaaggtgccaaagcctctctgagtgcttttgactacctgattcgcaccaaaactgcataagaagaagtaagattcacctgcaattgcttagccgccggggtcaaacctggcggcttttttatggcattaaaaagccccgccgggatggctccgggcagggcgggatacttattctggcaattaacgcacaaccagcaccggcagattggcgtggcggatcacgctgctggcgttagaacctaacagatgggtgctaatgcttgggttgcgagaaccaataactacaacatcagcccccagttcttctgccaactcattgacttcatcccgcacgctaccaaaacggacatgttgtttaatgcgggaaggatcgatggtgaagtggctgaccatcgtttgcagacgttcttgtgcttcatgttgcagatgctcttcaaaacgacgcacatcagcggcaaaacggtgcaggctcaggctggcactcccgggtagtacgtgaagtagatgaataactccgtcatcctgggcgaggaattcagcgtggcgaacagctttgtcgctcaattccatttcaaatacatcaactggcataatgattgtcttatacataaccctttctccctgttaatcatgaacaaatcattcgccatgattataatatttatccctgatatttgtctggttctttttccttacgaactgtttctgtgatgaatatattctcactgaacaccaggaattctcccaaaacctgtggtaccgcccgttttcccgctgtgatagctacccttaaagactgactcttttttgaactgtctctggaggttgcatgaaagcattgacttatcacggcccacatcacgttcaggtagaaaatgttcccgatccgggcgttgaacaggcagatgatattattctgcgtattacggcaacggcgatctgtggctctgacctccatctttatcgaggcaaaatacctcaggttaaacatggcgatatttttggtcatgaatttatgggggaagtagttgaaaccggaaaggacgtaaaaaatttgcaaaaaggcgaccgagtggtaattccgttcgtcattgcttgtggcgactgttttttctgtcgattgcaacaatatgccgcctgcgaaaataccaatgcgggtaaaggcgctgcgctcaataaaaaacagataccagctccagcggcattgtttggttatagtcacctgtatggcggcgttcctggtgggcaggcggaatatgtccgcgtccctaaagggaatgtggggccgtttaaagtaccgcctttgcttagtgatgataaagcgcttttcctttctgatattctgccaacggcatggcaggcagcaaaaaatgcgcagatccaacaaggtagtagcgttgcagtctatggtgctggtcctgtgggattgttgacaatcgcctgtgcacggttgctcggtgcggaacagatttttgttgttgatcatcatccctaccgcttgcatttcgccgccgaccgctacggcgcgatcccgattaattttgatgaagacagcgatccggcacagagtattattgaacaaacggcaggtcaccggggcgtggatgcagtaatagacgccgtcggttttgaagcgaaaggcagcaccacggaaacggtgctgactaacctgaaactggagggcagcagcggtaaagcgttgcgtcagtgtattgcggcggtcaggcgtggcggcattgttagcgtaccgggcgtctacgctggatttattcacggtttcctgtttggcgacgcctttgataaagggttgagctttaaaatgggacagacccacgttcacgcatggctgggagaattattaccgttaattgagaaaggattactgaaaccagaagaaattgttacccactatatgccgtttgaagaggccgcccggggatatgagattttcgaaaaacgtgaagaggagtgccgtaaggtgattctggtacccggtgcacaaagcgcagaggcggcgcagaaggcggttagtggtctggtgaatgcgatgccggggggaacaatatgatcgtcaggagtggttttcgaggtaaaggacagccatgacgataatcgccgccataatcagaaatcctatcaggatgtaaaatgcttctgccatggttattcccacaaacgaaacggaataattttgcagcaaaagtgaacagtgagaaccaggaaaaattgctgattttgcgtaaagaggatgcgagtgcatcctctgggcaaagcgagttatcgcttgtgcagatgggattaaagcaggtagtcgccagcagcttctggctggtattcgagttccagcacttcaaggtgggttgcaacgccgcccggaagttcccagtgaatggaatcgccaacgcgcagccccagcagtgcggcacctaccggagccataacggaaagctgagtattgctatcggtcatttttgccggatacaccagcgtgcgcacacgcacttcgccatcgctaagattgcggaatttaacccggctgttcattgtcaccacgtcgtgtggcatctcttctgggctacacatttgggcgcgatccaactctgcgtttaacgcgtcggcgattggcaaaccagcataggcgggttgctccagcagaatatcgatgcgttcggcatccaggtcgttaatgatgatagttggtctggacatttttactccatgtcgtcggtgctgcgagtgtcgcagataaacatacccaaaagaaaaccctcaccgtcaggcggcgagggtttaactcacatgatgatactgactgttgctcactctttgaagtgatttgcgtcacattcagggaattcctcaatgcagcgcattatgtataaatcttaatcgccttggtttatggaagacgaattagcgtgttttgtaaatcagatgattaataacccgctttatcaatcacaaaggttttgccacagttacctgggtgaggttgtggcaagaaactgtttgcagaaagcggagcgttgatggcgtcagctttgatgctgatctgaatttcagtcaaatacgcagggttaccctggcacgttagcttaactgctttcacgttctcttttccccagcttttggcaaaggcggcgtcaaagtcacggcggctcactgttttaccgtaattatccgcaaggaattttccggcttcgctctctttaatttcttgattcaggcgtaccatcgtaccgaagtatgcgtccggatcaaaaccaaagcaggcaccgtgtttggcatattcgtagcgttccaggcaggaacgtccgccagctcctggcatgacttcacttagtttagcggccgtttccagacttaatccggtttccgggctactacacattcggctggcgcgcgcttctggtagattcgggattgggcgagtagcgcaaccgaagcgcatccagcggcgttcatcaacaccacgggcagcaacgcttttaggcaatcctggccacagaccatgtacggtcagaaaatcagctttgttggtcgtttcggtttgcaggcgacattcatctcgttcgttacgatttcgatcgtgttgactctggcaaaatccggtttgccaggagagggccaggacatagcgatcaaaatcgccatactgttttgcctgcaacgctaaggcgttggcagaagagaagggaagcagagaaaccgcgagcaacgcggcgttacgccagaatgctttcataatgggtgtggaactcatacatacactgaatactatctattaaatcataaaaaagcccgccaggtgggcttacctggcgggcgtgatgatttattcagcgtttggcgaacgtattagttccacatggcgagaatcggccagccaaccaacagcaacatagagatgtaaatcaccccgaagattgcgccaagacgccagtaatctttacttttcacatagccacagccgtaaataatcaccccaggaccggttgcatacggcgtcagacagcccatgataccgatagacagcaccagcaggatacacagttgttccattggtacgcccggaatacctttaccgacggccagaataaccggcagcatggttgcggtgtgcgcagacaggctggcaaacaggtagtgtgcaaagtagaacaccagaaccagtacaatcaccgttgcgtttggactgaatccttccaggtgcgtactcatggtaccggcgaaccagtcaataaaaccagaacgagtcaggccgttagccatcacaaccagagttgccaggttgaccagtgtgttccatgcgctgttatagcgggtaatgtctttccaaggcacaacgtgcagggccagcattaggctaactgccagcagaccaaccgcagtagcattaatgacttcactgccaaatacccacaaacctaagctgagcaatacaaggccaatcagtgtccactctctgcgtgtcagcgcacccatggttttcagttcatcacccgcccaggttgccacttcttcactgtgtgtgatttccggtttgtacagcacgtaggaaagccacggcgcaatgataagcaagataaccccaaccggcaggaagcagaggaaccactgcaaccagctaatctggataccggcaattttgctgacgaactccagacccagcacgtttggtgccgcaccggtgacaaacatggagctactcagactggtactaatgaccatcatccacatcaaatagccgccaatacgacgcgcggacggatcgttcgggaaacttttaaacaacggcggcaggtttttaatgaccggaaaaaccgtacccccggtacgcgcggtgttggaaggtgtaaacggtgccagcagaatgtcgataatgacaatcgcataacccaacgtcagcgtgcgtttgcccatgaatttcaccaggaaaagggcaatgcgacgacctaacccggaaacttcataccctaatgcaaaaataaatgcgccaaataccagccataccgtggtgctggaaaaaccagccaggccccatttcagcgcctgtttttgcgcattaaacgctgggtcagctaattctttggcatcaaagagcaggtaattactgccaataacgcaaatagtaaccgcaataaaactgatcgctgttgccggaattggctcgaggatcatgccgacaatcattgccacaaacacagcgaagtaatgccatgcctgcggcggcataccgtcggggacagggataagaaacatgacacccatcaccaccagtggggccaatagtttccatatattatcttttgctaaagacatacgggttctccgaaaattaatatttccaaatttatcaagtgcttaaataattaaatctgtgctaaaaaccaggtaaggatcagtaggtcagcactgccgcctggactgagatttcgttcgatacactccctgtcgaactgccggagataatcgagatcggcgggggttcgaatgccccctttttgcaataatgtttgcgcctcgcgctgtagccagcgcaggcccccctcgccaccgcggcttgcaacgttggtatcgccgttgatcgccatcagtaggagcaaggtatcgagcaatgccagttcaggatctaacccctgatccagcagagtgaggtaatgcggcaaggcgtgattgatcaccagtggataacccgcttcggcttcaccgcgtgcgccggtaaggccaagctgttggtacaaccgttgacctgccgtcagttgactattattggtacgcagttcgcgatcggtcaggccacggcagaaacttgccgccgtagaacaaacggttgttggcgttaccggttggttgagttgaagcaaacggccaattgccgcacatagcagccctaaagaaaaaatgctgcctttatgcgtgtttacgcccgcagtggcgcggaacatatcaccttcgcaagccataccaattgggcgtaatccgtggagtaccgcttctggtgccatttccgcactacaggcaccaaattcaatgaaacggggtagccagccctgaatcgccagcgcgctgcggtggaaatcttccagcgccatatctttgtgcgcaccgcagttaatgcgatccacgaggcctggtttcggactcagattgacttcagtcagcatggcgcgccagcccagcagggcgtactcatcgattaaactcgtcgcaagctttgtggttttagtactcgttgcaggcatgctcatcgttcagcagtgcctccatgttatttagttgacgttgcaggcatcgacatcgttcagcagtgcctccatgcggttgagtaaatcggtcagttgatgggtttttccacgcgcgcagacggctgcgctttgttcgcacaacaggcagcggcgaggcggcagactatagtcgcggcgggagagaatttcgccttcgggcgtcaggacatcgatatcccataaccgcccgagaggatgactatgttcaagctcaatggtggcgagcttgaggtcgcgagccggggcggcaatgctcaacatgccctccggcccgctggcggaaaccagtgcagcctgctcctgaatttgccagccctgttttgcggctaaggcacgcaaggctgtcacgccatgattaaaaattcggcgtgtgacctcgctgtctttaatcggcccaggcgcaaccacggtaaaggagaccagtggaacaggatggcgcttgagccagacgtgttgccgtgcttgcctttcatcccggctgacgagcagctcgggaatacttaccgcatggtggctggcgagttcaggaagcaggtgcatggcttattccttcacctgatgcacaacatcgatcacgctgccatcgcggtaacgcacaacggcaacgacgcggtctgtgaattcaatcggctgtggttcaccggtcagcagacgcgcacgttcgcgcagccactcaatggaaaccactttaatgcccgcttcctgcagacgttctgccagttccggacgtgccgggttaactgcgataccgtggtctgtgaccagaatatcgacactggagcctggggtgatgcaggtcagtacgttatccaccagagtcggaatacgaccgcgtaccagcggcgcgacgatgatggaaagcgcagaggcaatcgcggtatcgcagtgaccaccggaagcaccacgcagtacgccgtcagagccggtcagcacgttaacgttgaactgggtgtcaatttccagcgcgctcagtaccaccacgtcgagacgatcaacgcttgcgcctttgctaccccagttagcgtactggttggcgctgatttcgatgtgattggggttacgggccaggctttgcgcagcatggctgtcaaagctctgcacatccagcagtttgcggatcagacctttttcgtgcaggtcaaccatcgtcgcggtaataccgccaagggcgaagtcggcgcgaatatcgcggctacgcattttgtcttccaggaaacgggttaccgccaggcttgcgccgccggtgccggtttgcatggagaaaccttctttgaagtagccagagttgacaatcacatccgcagcgctacgggcaataagcagttcgcgcgggttagtggtcatacgggtcgcgccagcgccgatttttgcagcatcgccaacgcggtcaactttgacgatcaaatcaacctgatcttgctcaatgcttgccggattatgcggataaggcagcagttcttcggtaagcatcacgacctgttttgcgttgtcggcatcaactattgcatagccgagggagccgcagcaggctttaccggtgtagccgttggcattaccgaattcatcacaggacgggacgccgaggaaagccacgtcgatattcagttcgccgctctgtaccagatgcacacgaccgccgtgagagtggatctgcaccggttctgccagcagaccacgggagatctcttccgccagtggaccacgcaggccggaggtataaatgcgggtaaccacgccctggcgaatgtgttctaccagcggcgcatggcaatcactcagggagctggacgccagggtcaggtttttaaagcccatcttcgcgatgacgtccatcaccatattgacggtcaggtcaccgccacggaaagcgtgatggaaggaaaccgtcatgccgtcctgtaaaccagagcgacgaatcgcttcttccaggttggcgcacagtttgcgatcgcgcgctttttcagcctggtaggtttgctttgggctgttctggaaagcggcaagatcgcattcagcgcgacgattccaggccgctacccgttcttgtcgttgagattgttcaattttctgcgtcattttgattgccttattcttcgcggatgccggaaagttctgcacgggagagcaccagacgggcgcgatcgataaccggaccgtccaccatcttgccgttcagggaaaccacgccgaggccttcgcgagcggcggcttcagcggcttctacgacgcggcgggcgtgatccacttctttctgggtcggtgcgtagaggttgtgcagcagatcaatctgacgcgggttgatcaggcttttgccgtcaaagcccagctgtttgatgtgggcggcttcttgcagaaatccggcttcgttgttagcgtcggaatagacggtatcgaacgcctgaatacccgcagagcgcgcggcctgcaaaatggaacagcgtgcgaacagcagttcagttccttccggggagcgttctgtacgcaggttgcgcacatagtcttctgcaccgagggcgataccgatcaaacgctcggaagcgtgagcgatttccactgcgcgggtaatccccagcggagattcaatcgccgccagcaggccggtgctgccgggttcacgaccacaggctttttcgatacgcaggatctctttttcaatatccagaacatcctgagcggtatcggttttcggcagacgcacaacgtccgcaccaccgcgaacgacggcttccaggtcgttaacaccccattcggaatccagcgcgttgacacgcacaatggtttcaatatcgcgatacagcggatgttgcagcgcgtggtaaaccatgcggcgggcggtgtctttttcacgcaatgctacggagtcttcgaggtcaaacatcagggcatcagccgggtagatgaaggagttgctgaccatcgcggcattggcaccaggcacaaacaacatgctgcggcgggtgcgagttttacgttgttgcaggctagcggaaatcattggcaatcctcccatggcagagccgggataccgctggcgcgtgccagcagggcttccagtcgtgcacgtaaaatgcagtacagtgcgcctttgtcatcgacattcagctgtacgccgcgcacgttgtagcgggcgagaacgtccagaatggtggtgcgaattgcatcgccaaactgtttctcaacgctgctattgatttgcaggtcgatatcctgcgtatcgagtggggcgatgcgtatcatcacatccccagactcaagggtgcctgcaacggcgggctggtttattttcatttttcacctgtttctcatgcgggggtcttttgacgagctgccgcgtcctggcgggagtgctcaagcaggttctgcaaataatgcagcgtgactgcagggaccagcggcgcgatagccgtgagatcgtttttcgccagcagttgacgtacccgggaagcggatatcggcatctcctggtaacgcagccgctcaatttcaaccagttcgatgggcggtgcggagatagtcggcgtttccagccagtagcgcatatcctggttgtactgggcggtaacgcgacaaaagggttcagtaccgacaaagcggtgagttacacccagcgcgggagcgaggtactgacggaaaatcttcagatcaatttcggtgtaacaatggttaatgacgctctgttctttaatgaagtagcaagggaacgtagcgcgggagatgatgtattcggagccacgatgcacagtcaggcgtggaatatcggcggtgccttttaacaccaaatccagccggtcttcataggggaagcgactagaatcttctttgactaaaaacagatgcaaccagtcgcactgtgccgcagcctgttgaatcagataacggtgaccattcgtaaagggattggcgttcatcacaatgcagccaatcttgttccctggatgacgaaattttttcaggctttcggcatagcgtttcagtcgcgtggcgctgttttccatcagcaccatcacgccgggtacgctggtcagcgtggaaaaaccgcactggcggaacagcgcctcgtattcggttttggtataaataaacagatgcgtgctgtgccgctcataggcgaggtttatcaattcagtggctaatgtcagcgccagtccttcaccgcggacggattcactgatagcaacgcatttaataatatttccggcaattccaccgcacgcgataagcttttcatcgcgggttacggtaataaatacttcgactgtggtgtcaacgctcaaatcattttcatgcaggaattgggcgatttccgccatttttttattttcactacgttttacgcgggtgaaaatatcattgccgaacataataaatagtatcctgaaggtgcatgttgttatcgatttgcaacgaatgttgttcaatgttgcaaactgataaccttttattttcacttgggagaaagggggtgatcgaggtatatctttttctcctttcgctatacatcctaaggagtatttcggcgtgaaattttgatttatttcacatagagttagtggttttttatttatttaatgattttaagttttttaattaatgtaattacgaaatgactcgcaggtttaagtgatttaattgatttaatgaataaaatttgccacgatcataattaatatctatgtattttgattcaacattttaattacatccgtcaaagaggctcgggacaacccgcaaggaaaacaatgttgcagcttaacgagaataaacagtttgcatttttccaaagactggcatttccgctgcgtatctttttgctgattctggtgttcagtatatttgtcattgcagccctggcgcaatattttacggccagttttgaggactatttaacgcttcatgtacgcgacatggcaatgaatcaggcgaaaattattgcctccaatgacagtgtcatctctgcggtgaaaacgcgtgactacaaacggctggcgaccatcgctaacaaattacaaagagataccgattttgattatgtggtgattggggaccggcacagcatccgcctttaccatcctaatccggagaaaattggttatcctatgcagttcaccaaacagggcgcgctggagaaaggggagagctacttcattaccgggaaagggagtatggggatggcgatgcgcgccaaaacgccaatctttgatgacgatggaaaagtcatcggcgtggtgagcattggctacctggtgagtaaaatcgatagctggcgggctgagtttttattaccgatggcaggtgtgtttgtcgtgctgttagggattctgatgttgctgagctggttcctggccgcgcatatccgtcggcagatgatgggcatggagccaaagcaaatcgcacgcgtggtccgtcagcaagaggcgctgtttagtagcgtttatgaagggctgattgcggtggatccgcatggttacattaccgccatcaatcgtaacgcaagaaagatgctggggctgagttcccccggacggcaatggttgggtaaacccattgttgaagtggtcaggcccgccgatttctttaccgaacagattgatgaaaaacgtcaggatgtggtggcgaactttaacggtctgagcgttattgccaaccgggaagctattcgtagtggtgatgatttgctgggggccattatcagctttcgtagtaaagacgaaatttccaccctcaatgcgcaactgacgcaaataaaacaatacgttgagagccttcgtacattgcgacacgagcatctcaattggatgagcacgctcaatggtctgttgcagatgaaagagtatgatcgcgtgctggcgatggtgcagggggagtctcaggcccagcaacagcttattgacagcctgcgcgaggcgtttgccgatcgccaggtggcggggctgctttttggtaaagtgcagcgcgcccgggaactggggctaaaaatgatcattgtccccggtagccagcttagccaactgccgccaggactggatagcaccgagtttgcagccattgtgggcaatttacttgataacgccttcgaagccagcctgcgtagcgatgaaggaaacaagatcgttgaattattcctcagcgatgaaggcgatgatgtggtgattgaagtcgccgatcagggctgcggcgttccagagtctctacgagacaaaatatttgagcagggggtcagtacgcgtgctgacgagcccggtgaacatggcattgggttgtacttgattgccagctacgtaacgcgctgcggtggtgttatcactctcgaagataatgatccctgcggtaccttatttagtatctatattccgaaagtgaaacctaatgacagctccattaaccctattgatcgttgaggacgaaacgccgctggcagagatgcatgcggaatatattcgtcacattcccggattcagtcagatattactggcgggaaatctggcgcaggcccgaatgatgatcgagcgttttaagccggggctaatcttgctcgataactatcttcctgacggtagagggattaatttactgcatgaactggtgcaggcgcattatcccggcgacgtggtgtttaccactgcagccagcgatatggaaacggtgtctgaagccgtacgttgtggtgtatttgattatctcattaagcccattgcctatgaacggctggggcaaacgctaacccgtttccgccagcgtaaacatatgctggaaagtattgatagcgccagccagaagcaaattgatgagatgtttaatgcttatgctcgcggtgaacctaaggacgagctaccgaccggcattgaccccttgacgctaaacgcggtgcgaaaactgtttaaagagcctggtgtgcaacatacggcagaaacggtggcgcaggcactgaccatcagccgcaccactgccaggcgttatcttgaatattgcgccagccgccatctgattattgctgaaattgttcacggcaaagttggcagaccacaacgcatataccacagtgggtgacatgataaagccggaggaaacttgcctccggcattactatttacttgcctgtgaccgctgctgccgttcctggcaccatcagctctgtagcaacgataacaatcaccaaaccaacaagcaccggtacgctggtgcgttttacgacttcaaacgggctgatcttcgccatcccggcaaccgcaacgactacgccagaaacggggctaagggtacggccaaggttactcgcctgcagcatcgggatagtcaaatacgccgggttaatgccggaagagtgcgccagtttcgggatcatctcaacaaacgcataaaacggcgcattgccactaccggtcgtgactgccgccagcattgtcagaatcaccaataccagcatcaggatgatactcgcgctaccaaagctggtagcgatagaaatcagactttgaataaagccgatggtgctaagcccctgagcgaataccccagcggcaaccagcagcatcaccacgttagcaaacgcatctgccatcccgcgataagccacttccagaccagagaaaactttctgggtattaaagctgcggaggaactccagaatggaggcaatcagcatacaaatcaccagaatagtgatgatgtgtaattgcggaccccatttaccgtcaaaaatcagtacaccgatgatcggcgtgaacggcaaaatggcataaaacgcaggagcagtggtggtgatttcactgacatctaacatttcatgagagatgtgctcttttttatccagataacgttgccagaagaagtgggcgatcgccatgccgataattgcagcaatactgataggcagcgtcgttttgaaggcgaagtcaatcaggctcatttcggaagcttgcgccgccagcaccacatccccactagtcggtgcgagaataatcgccgccggggaggcacaaatggcagcagctgcgccacgactgataccaacgtttaccatcaccggaaatagggttgccatcagcaaaacacccagaccggttgcggaagagacggccagagacatcagacaggcgacaaaataggcggcaatcatcagcaggtaaggggagttaatatactgcaatggtttactcgccagcttgaccaccatatcattcgcgccgatatgggtcatgtaagcggcaaatccacacagcatcataatcatcatgccgaggtcgccgccgcggctcattagtaatattttaacgtattcaacgatatccgtggcgctgtagcctgtactagcctggctggacggtaacactttgtgccccataatggcactgataatcagcaataacaggccaccgacaaataacacaccagtggcggaataccctttaatgatgtagcgagctacacccacaataaccacaaccccaataaggagctcaatgaatgtcagcataatttttcctgtctccaggccccaaagtaaataataaaaaattcctaaagcttaaggaaaaaatatgcccaataaattggcgatgaatgctgattaaaatcaagaaaaactgccattaagacattgaagttgctgtttttatacatagataacaaaacgcatatttagcggttggcaattatcacataataatgtgtgcaaattgatggtggattgatgcaaatttgttaattgcaatggtgttagctgcggctgtgcgctcaaaaaataatctaatatgagcataggttgacgatatatattatatacttcgttaagatgattgttgtatctcgttaaaaaataaaataatttttccttgattgcattttgtcatcaaaaaagacttggtttttcttttttgactattcccatcgcagaaaacgacgcatcatctttaatcgatgcgcggaaatatttaacttgaacaagcggaaataaatagagcagctattcagattattctttatgttgggtctattaaggttatgttaattgtagctttgctatgctagtagtagatttttgataaatgttttatggtcacaaatgaacgtgagtaaatatgtcgctatcttttcctttgtttttattcagttaatcagcgttggtaaagtttttgctaacgcagatgagtggatgacaacgtttagagaaaatattgcacaaacctggcaacagcctgaacattatgatttatatattcctgccatcacctggcatgcacgtttcgcttacgacaaagaaaaaaccgatcgctataacgagcgaccgtggggtggcggttttggcctgagccgttgggatgaaaaaggaaactggcatggcctgtatgccatggcatttaaggacagctggaacaaatgggaaccgattgccggatacggatgggaaagtacctggcgaccgctggcggatgaaaattttcatttaggtctgggattcaccgctggcgtaacggcacgcgataactggaattacatccctctcccggttctactgccattggcctccgtgggttatggcccagtgacttttcagatgacctacattccgggtacctacaacaatggcaatgtgtactttgcctggatgcgctttcagttttgagacaaatgaagttttagtaacttctttaaaatcaatagctaaaataagtaacatcaaaaataacgcgacttttatcactttttagtaaagttacactggacaaagcgtaccacaattggtgtactggtaaccgacacagcatttgtgtctatttttcatgtaaaggtaattttgatgtctaagattaaaggtaacgttaagtggtttaatgagtccaaaggattcggtttcattactccggaagacggcagcaaagacgtgttcgtacacttctctgcaatccagactaatggttttaaaactcttgctgaaggtcagcgcgtagagttcgaaatcactaacggtgccaaaggcccttctgctgcaaacgtaatcgctctgtaagatacgtcagcaagaattcaaaacccgcttaatcagcgggttttttttggtctttagtgtgcggtactggcgctaaacagccagaatgccagtgcggtcatggcaaaagaccccagaaggttgacgaaaacgttcagtaatgcccagccaaagcggccctcttgtaacaaaaacaccacttctgcgctaaatgtactgaaggttgttagaccgccacaaaatccggtggtgattaatactttccacactggatcaatgttcgtcatcctgctgaaccatgcgaatcctattcctatgatgaatgccccaatcaggtttgctgtcagcgtccccaacggaatcgcctgatgcagtgggttaaatcgcatacttaacagccatctcgccacgcttcccgtaccaccgccaataaaaactgctaaaagaagttgtaacactgcaaaatcctgctatttgatttgtatgagtgataagtgtaacgccgaataatcgtcgttggcgaattttacgactctgacaggaggtggcaatgctggttgccgcaggacagtttgctgttacatctgtgtgggaaaagaacgctgagatttgtgccagcttgatggcgcaggcggcggaaaacgacgcaagcctgtttgccctgccggaagcattgctggcgcgcgatgatcatgatgcagatctaagcgttaaaagtgcacagctgctggaaggcgaattcctcggactttacggcgagaaagtaaacgtaacatgatgacgacaattctgacgattcatgttcctagtacgccggggcgcgcatggaatatgctggtggcacttcaggcaggaaacatcgtcgcccgttatgccaaactgcatctctatgatgcatttgccattcaggaaagtcgccgtgttgatgctggtaatgaaatcgctccgttactggaggtggaagggatgaaggtcggtctgatgacctgttatgacttacgctttccagagctggcgctggcacaggcattacagggagctgaaatcctggtacttcctgccgcctgggttcgcgggccgctcaaagagcatcactggagtacgttgcttgccgctcgtgcgctggataccacctgttatatggtggcggcgggggagtgcgggaacaaaaatatcggtcaaagccggattatagatccctttggcgtcaccattgcggcagcgagtgaaatgcctgcactcattatggcggaagtgacgcccgaacgtgtgcgtcaggtgcgcgcgcaactgcccgtcttaaacaaccgtcgctttgcgccgccgcaattattatgatgtttttttactcggcgcttgattcaccttgttacagattgctattgtgtgcgcgcgtcgaatgaccgttaatattctctggtttttaaggcgcgttctgttgccggttatatgtcaagaaggtatctatgggtgagattagtattaccaaactgctggtagttgcggcgctggtcgttctgctgtttgggactaagaagttacgtacgctgggcggagaccttggagcggccattaaagggttcaagaaggcgatgaatgatgacgatgctgcggcgaaaaaaggcgcagacgttgatcttcaggctgaaaagctctctcataaagagtgacgtggcgagcaggacgctccctcaatatcttgttcgatacaaaaaacccgcttcaaaaagcgggttttttatcagacagatgtaagtaattattacaggattacttaacttccatccctttcgcctgcaaatcggcgtggtaagaagagcggacaaacggaccgcatgcagcatgggtaaagcccatcgccagcgcttcggctttcatttcgtcgaactcatccgggctaacgtaacgttgaaccggcaggtgatggcggcttggctgcaaatattgccccagcgttaacatcgtcacaccatgacggcgcaggtcgcgcattacctcaataatttcttcattggtttcacccagtcccaccatcagaccagacttggtcgggatttccggatgcgcttctttaaagcgttccagcagcttcaggctccagttgtaatctgcaccaggccgtacctgacggtaaatacgcggtacgttttccaggttatggttgaacacatctggtggcgttgcagtcagaatatccagagcacgatccatacgaccgcggaaatccggcaccagagtttcaattttgatttgcgggcttttttcccgaatggcagtaatgcaatccgcaaagtgctgggcaccgccatcgcgcaggtcatcacggtcaacggaggtgataaccacataacgcagcgccatatcggcaatggtctgcgccagtttcactggttcattggcatcaggagctaccgggcgaccgtgggcaacatcacagaacggacaacggcgggtacaaatagcgccgaggatcataaacgttgctgtgccgtggttgaagcattccgccaggttagggcaggaggcttcctcgcagacagaatgcaggccatttttgcgcattgcggctttgatgccctggatacgtgtagagtccgctggaagcttgattttcatccattccggcttgcgcagcagggcttcgcgctctgttgccacgtttttaaccgggataagggccatcttatcggcatcgcggtatttaacaccgcgttccatcacaatgggtttactcatagcgtgcgtgttccagttgcgaattacgaaggaaagcgtttcaattcaatagattgttgtaattatcaactatttttgaattaacgactggcagtatatcattgaaacggacctgaaagcagccaaagcggtcgcgaaaatgtaaaattgttgttggattgtgccattttatcgttctgcgctgtgatctggctgtaacaatactttttcaaaatgcattacggataacatctattactccgtgcaggatgggatcacgcaggctgaatttgttgtagtggatagagaaatctatttgctcctcatttaaggacggaaaaggcagtttttccagcggccagcagcggctaaacaggttataaaaacggctgggaataatcgctaacatgtcactgttggcaaccagtgcagcgattgtcaaaatgttgtagctggtgaaattgatttgccggtccggaaacatttcttgaactctctgccgcagaccgctgaaattttgctcttccggtaacagaagtacatgcgcagcgttgtcgatagtctctctgtcatcttctaaagagagtagtggatttccctcgcggcaaattaacaccatattgtcggtgaacagaacatgatgttgcaccgtacgattggtgcaaaacatgttatcgatgatgagatcggtttgaaactgactgagttggttttccgcgtcgctgatgggcgggttgcgcagtaaaagctgcggatagtgagttttaatcgcccgatagatgacaggaaggaccagtgctccgacgctgggagtggtcgcaatagttatcgttcgttgcttatcatagcttccttcgatatccagcgcgccaagaatggactcaaggccctgactgatatactcatgtagatgcatcgcaaatgcggtaggagtgacaccctggcctttgcgaataaacaatgggtcagggaatataacgcgcagtttctgaatagactgactgattgcgctgggggtcagattaagcactttcgctgcattaacgatccctttatgtacatatacagcttcaaaaatagtcagaaggttaagatcaatatttcgtaaggttgtaaatatttgtggtttaccttcactgctctttctgcttaaacagggttcaatttgattattactatccacgcacttactccaattttattcatggaaaaataatatttaaaaaattacaataatcttatgtctaattggaacggaacgcttttgctcaccataatcaactatttcaataggttaatcaatggggtgagttacggagcaaggcgtggcaccgcatttctgcaagtgataaagaaaatatacaaacgcgaaggagatgtaaagcattagcagatattatgagtaatgacccagtgtaaattgggccattgatgtatggaattaagcggtaatatattcgaagtccggattgtttagtagcgctaaaatattttccagtaaacgtggagcaatattattagtcgtcgcttcgggtttccattgacttattttagccatttccattccggcatacccacaaggattaatacgtaaaaatggactaagatccatattgacgtttaatgccagaccgtggaaactacaaccgcgtcgaatacgtaaacccagactgcaaattttcttttccccaacatagacacctggcgcgtcagcccgaggatgcgcttctatacccagttcagccagggtattcaccactgtttgctcaagcaaggtcaccagttcacgcacaccgagtttacggcgtttcaggttaagcaacacatacatcacctgttgccccggcccgtgataagtcacctgcccaccgcgatcgctctggatcaccggaatatcacccggcattaaaatgtgctccgcttttcctgcctgaccttgggtgaataccggatagtgctcgaccagccagatttcatcaagggtactatcatcgcgggtatcggtgaattcatgcatagcctgggagattggctcgtaaggctgaagaccgagctggcggacaagaattttatcctgatacaaaacggcatctccgtggagaatgagtaaaagtgggggaaaagtatatcacagcgaggagaggggagttacccgaccaggagccgggtaacggagaagcgagttacagaaccatgcggacaatatcgattttgcccagttcttcatacagtgtttcaacctgctcgatatgagtggcgttgatagtgatagatacgctgtggtagttgcctttgctgcttggttttaccgttggggtgtagtcacctggcgcatggcgctgtaccacttcaaccacctgatcaaccagctcaggtaacgcctgccccataactttgtaagtaaaaggagtagggaattcaagcagttcgttaagtttggttttcatgtcagctccggcgtaacgtaattaaatagcaactcccgccagaaggcgggagttttttactgatgcttagtatatggggacggaaattacactttcaagtgtttaatttttaaccaaaccagtgatggaacattaatttaatgtaatcaatgattttgccgaagaagttaccttccgggatttcttgcaacacaaccagcgggcgttgctcgatcgttttgccatcaagctggaagttgatagttccgacgacctgattcttttgcagcggcgcatgcaattcactgctgttcagcacatagctggctttcagatctttcatgcgaccacgcggaatggtcaggtacacgtctttatcaacccctaagctagcgcgatcagaatcaccaaaccaaaccggttcagaggcgaactctttacctactttcagtgggttaacggtttcaaagaaacggaagccccaggttagcagttttttactttcggcttcacggcctttaaaagtacgtccgcccattaccgcagaaatcaagcgcatctggccttcagtcgcagaagcaacaaggttgtaacctgctttgtcagtgtgtccggttttgatgccgtcgacattcaggctgttatcccataacaggccgttacggttcagctggcgaataccgttaaacgtaaattctttttctttatagatgctgtattcattcggtacgtcacggatcaatgcctggccgatcagcgccatatctcgcgcggagctgtactgaccatcagcatccagaccatgtaccgtctggaagtgggtatttttcaggcccagtgcgttaacgtagctgttcatcaagccaacaaaagcgtcctggctaccagcggcaaaatcggccatggcgacacaagcatcgttaccgctttgcaggttaataccgcggatcagctgagaaaccggaacctgcatgcccggtttgaggaacatcaggctagaacctttaaacaccgggttaccggtggcccatgcgtcgttgccgatagtgactaaatcagtttctttaaatttaccggctttcattgcctggccgataacgtaactggtcatcattttggtcaggctggcaggatcgcggcggacatctgcgttctgttcggcgagcactttgccggagttatagtcaatcaggatgtaggactccgcatcgatctgcggtacacccgggatcatagttttgatattcaggtcatcggcatgtgcagcagagataaaggctgtgcaaagagccgtggtgagcgccaggcgcttcatgatacgagcggaaaaaatggtattcatggtctgaactacgacatccgtgatggaattaaaaaagtgccctactatagcaaatgcactaccggcaggcatctgactttccgcgtgactttgttaacgtcatttacagaaattgacacatcagatgcctgctttacgttactgcgcggtagtaataaaactctgtaattgggcttcggtttgcaaacgttgctgcaaggtactggcttcggctttgctggcgaatgggccaagctggatccgccagaccgcgccattttgagttacgcgaccggggacgccgaacttctgtcccagttgctgttggtactgttgcgcacgagcctgatcgcttacggccccgacttgcaccataaagttgccgctggcgctttggctgacggcttgcggtgtcaccattgcagggctggttgcaggcgttgtgctcggagctgtaacaacgggctgtggcgcaggcgtcggttcgctgccttccagtacaccaggcgctaaggtcgttggtgcgccgaggaaaccgctactggttaccggcgcgccggtcggatcttcgctttttagcgtgctattactgaccggaagaatgtcaccctgcgggccagacacactacttgttcccgcgccaccgcttaaatcgggaggtgcaggcagggcgtaagtctgtttggcgactgtggtacaagccataccaggaccagaaaggctaccatcctgggcaacaataatcggatcgatacgaactttggtgttgttactcgtgttaagacggtcagctgccgcgcgagaaagactaataacgcggtcgttgccgtaagggccgcgatcattaatgcgcaccacgatcattcgcccgttagccaggttagtgattctggcgtagctggggatcggaagcgttggatgggctgccgtcagctgtgtcggatcgaatgcttcgccagaggccgtcaggttactgccgggttcggcatcatagattgccgccagtcccgcctggctaaatcgagacggatcctgcacgattttgtagcttttaccgtcgcgctggtaatcctgatttgccgtcgcgttcagtggttcgaaacgcgggtccgccccgctaatttcaactatagggccgttacataccgcaggctgcggtacacttaccgtctgttgctgaccatcatcgcttgtacatgccgcgagcattcctgccgcgatgcagatcccgagccactgcttacgcattgcgcacctcttacacgcttttgctcaacattttcctgtgggtgtggatactcattacaatcccgaacccagccatcagcacaattagcgcgcttcctccataactgaccagtgggagcggaacccctacaaccggcagaataccgcttaccataccaatatttacgaagacataaacgaataatatcagcattaagccgccagccatgacgcgaccaaaggtggtttgcgctctggcggctatccacagcccgcgcatgatcagcagaatgtagagagcgagcagaatcagaatgcccactaatcccagctcttccgccagtaccgcgaagataaagtcagtatggcgttcggggagaaattcaagctgactctgagtgccgtgcagccagcctttgccgcgtaatccgccggagccaatagcaattttagactgaataatgtgatagcccgcgccgagtgggtcactttccgggtccaggagcatcattacgcgctggcgctggtaatcatgcatcaggaagaaccacagaatcggaatgaacgccgctaccagcactactgcgacgccaatcagacgccagctaaggccagagaggaacagtacaaacagaccggaaagcgcaacgaggatacttgttcccaggtcaggctgtgcagccaccagcagcgtgggcataaatatcagcaccagcgcgatgccagtgttcttcaagcttggcgggcaaacgtcgcggttgataaagcgcgcaaccatcagtggtacggctattttggcaatttcgctcggctgaaaacgaacaataccgaggtccagccagcgttgagcacctttagagatggcaccgaaagcatctaccgccaccagcaaaataatacagatgatatagagatagggggcccagccttcataaacgcgtggaggaatttgcgccatcaccaccatgatgaccagacccatcgcgatttggccgattttacgctccatcatgccaatatcctgaccgctggcgctccagataaccagggcgctgtaaaccagcaatgccagtaagatcagcagcattgtgggatcgagatggactttatcccagaatgtttttttattcggattatccgtcatgattaatggtcctccgctgcggcaaccgctggattttccgcaggcagatcggtgttgttatcacccagcataatgtggtcgaggatctggcgcatcagtgtaccaaccgccggacccgcaccaccgttctccagaatcatggcgacagccacttgcggattgttgtatggcgcaaaggcggtcatcagtttgtggtcacgtaaacgctcggcaattttgtgcgcattataggtttcgttcgctttcagaccgaagacctgagcggtaccggatttcgccgcaattttgtacggtgcgctagcaaagtatttatgcgccgtaccgttagggcggttagcaacaccgtacataccgtctttcgccagctcccagtaaccggaatgaatatcgccgacgggcggttcatgcggctgtacccatggcacctgtttgccgtcttcggcggtgctcatcagcaaatgaggaaccttcacgataccgtcattaatcaggatcatcagtgccttactcatctggattggggtcgctgtccagtaaccctgaccgataccaaccggaatggtgtcaccctgataccacggttttttaaagcgtttctgtttccattcgcgggtaggcatgttgccggaacgttcttccgccaggtcgataccggtgtaatgaccataaccgaatttacccatccattcggagaggcgatcgatccccatatcgtaggccacctgatagaagaaggtatccgcagattcttccaggcttcttgtgacattcagacgcccgtggccccattttttccagtcacgataacgtttttcgctacctggcagttgccaccagcctgggtcaaacagcgtcgtattgcgcgtgatcaccccggcgctcaatgcgctaaccgccacatagggtttaactgtagacgcgggaggataaaccccctgtgtggcgcggttcaccagcggtgtattcggatcgttcaacaaggcggaataatctttgctggagataccgtcaacaaacaagtttgggtcataactaggcgtggaaaccagcgccagcaccccacctgtacgcggatcggtgactaccacagctgcgcggctacccgccagcagcgtttcaatatattgctggagtttgagatccagcgtcaggtaaatatcgtgtccggcttgcggtggtacttcttttaactggcgaataacacgcccacggttgttaacttcaacctcttcataaccggtctgaccgtgcagcacatcttcatagtaacgctcaatgcccagcttaccgatatcatgcgttgccgcatagttggccagtttgccgtcattattcaggcgttcgacgtctttatcgttgattttgctcacatagccgatgacgtgggtcaacgcgctaccgtaaggatagtaacgacgtttatagcctttaacttcgacacccggaaaacggtactgattgacggcaaagcgagctacttgtacttcggtcaggttagttttcaccggaatagaggtgaaacggtgactacgtgcgcgctcttttcggaatgcagcaatatcgtcatcggtcagatctaccacgctgcgcaaagcgtccagcgtttgctgcacgttatcgactttctccggcatcatttctatctggtagatagtgcggttgagggccagagggataccgttacgatcgtagataatgccgcggctgggcgcgataggcaccagcttaatgcggttttcattagagcgggtctggtagtcggtaaagcgaacaatttgcagattatacaggttggcgataagcacgccggtcagcagcaaaatccccaaaaaggcgaccagcgcccggcgcacaaacagcgcggactctgccgtatagtcgcgaaaagagttctgtagtttcatccgctgcgttttctactcaaagctcccttatcactcacggtgataaggatggttggtggtgatgctccacgcccggtacagactctctgcgaccagcacgcgaaccagcggatgggggagggtaagcgcgctcaggctccagctctgctcagccgccgctttacaggcagggctcaacccttcaggcccgccaatcagtagactgacgtcgcgaccatccagcttccagcgttccagctcagcggctaactgcggcgtatcccagggcttgcctggaatatcgagggtgacaatgcggtttttgcctgcggccgccaacatctgctcaccctctttgtcgagtatgcgcttgatgtccgcattcttgccgcgttttccggccggaatttcaatcagctcgaagggcatatctttcggaaaacgacgcaggtactcggtaaaaccggtttgtacccagtccggcattttcgttcccacggcgacaagttgcagcttcacgcattaactccagagtttttccagttcatacaggcgacggctctcttcctgcatgacatggacaatcacatcgcccaaatccacgacaatccagtcggcgctgttttcaccttctacgccgagcggtaacaggcccgctgcgcgagactcctgcacaacgtggtcagcaatggacataacatgacggctggacgtacccgtacagatgatcatgcagtcggtgatgctggatttgccctgaacgtctaaggcgatgatgtcctgacctttgaggtcatcaattttgtcgataacaaaatcctggagtgctttaccctgcaagttttccccctgggtgaatcaaatagataaaaatggtctgtcagtatacctgaaccagaggcgatttcgggacaattgtcgccgaatcggctttcgaaagtgggctatcatcccaccccgcgccgcagattgcatcgccatttttgtaaaacaatttctacaaagtcgtgtctggcggaaaaagtctggctgcggagaatatcagcctgcccgggtctgtcaatggtcgttgcggcttacccgtaaaaaaacagaaaagtcatgcattctcgaccccgatggcacggctattgaggacgcgtagcgtcgcgaatttttggttgatatcaatggcgctccaacacccctggtcaacgcgaaaatgccacatagcttcggcaggcatgccaattaaacgggcgattaacagactcagtacaccctgatggctgacgactaaaatattctgatagtgctgaaattcactaagccttgcgataaagcgttccacacgttggctaaatgcctgaaatccttcaccgttcgtggggattgcatgctgccagtcattgcaccacgcgctatagttttcggcatcttcttgcatgaggtcgcgatgatgtcgcatctcccagtcgccaaaaaacatttcgttgagttcaggtatgatttgcacggggagctggcggtcactgagaaccagtcgcgcggtatgctgtgcccgttccagttcactgcataaaaccagatcaaaggaaacaccatgtagcagcgtatgcagattttgcgcttgctcaataccgcgcgcggtcaggggggtgggcgcatgaccgctgtaaagaccatcgatattcgcttgcgtttcaccatgacgaattaaccacagtcgcatcatgccctccgtaacgacaggtatcagcgatacaagccttgttggttaatgtaagtcagtaccggttccggcaataaatcctcacaactttcaccgttttgcaaacgttcgcggatgatggtcgcgctgatgttaaaccacggcgtttcagccagataaattttaccggcaggctgaaggtgaagatcttccgggttatgtgtcaaatgatcttccagccattgctggtattgcggttgcgccatttcaagtgggtaacctggacgccgacagacgatcaaatgtgcattgtcgagtatcgtttcgtattcgtaccaggtcggaaaggtcagcagactatcctgaccaataataaacgccagcggcacgtccggtccttgttcctgccgccactctttcagtgtttgcgcagtgtaagagggggcattgcgctttagctcgcgttcatcaagagtaaataatggcttgtcggcaatcgccagttcaagcatgtgtttacgctgcacgctgttcgcttccggctggggacgatgcggaggaacattattagggatgattgtgacccgcgtcagaccaatcaaattcgccagcgtttccacgggttttagatgaccatagtgcaccggatcaaaggtgccgccaaacagagcctgtaaagatttcatatcaaccgtcgataaatacgtccgccaggggtttatggcacaacagaagagataacccttccagctctgcccacacactctgaccgtaatcttgtttgagggtgagttccgttcgtgtcaggagttgcacggcctgacgtaactgcgtctgacttaagcgatttaacgcctcgcccatcatgccccggcggttctgccatacccgatgcttatcaaacaacgcacgcagtggcgtatgggcagactggcgtttcaggttaaccagtaacaacagttcacgttgtaatgtgcgcaacaaaataaccggttcgctgccttccagacgcagttgctgaagaatatgcaatgcgcgcttactttttcccatcaacaaagcatcaacccaatgaaaaggggtgaaatgcgcggcatcattcaccgcctgttcaacgcgcggtaatgtcaatttgccgtctggccagagcaggcttaaacgctccagtgcctgagccagcgccagcaggttaccttcataacagtagcagagcacctgatttgccgcgtcatccagttctaagttgagctgttttgcgcgcgcagcaacccagcggggaagctgagcctgctccggtgtctgacaggtcacctgcacgctgcgattcgcaagcgcagtaaaccaggcggcattttcttgcgctttgcttaatttattaccgcggacgatcaacagcaggtcgtcatgcagaagtccggtgagtgtgagaagttgctcattgatcgccgcattcggtccgttttctggtaacaacagcaatagcgtttgtcgactggcaaacagactcatagcctggcataagctaaagatcgcattccagtcagtgttgggatcaatggaaaaagtgtggtgttcttcgaatccttgtgccgcagctacctgacgaacagcgtcctggctttcctgcaataacagaggatcgttaccaagtaaaagatacgccgcgcgcagcccttcattgagctgcgcgcggagttgttccgggtacaaccgaatcatcagttacccagcgtggtggagacgcgtgcaggcgttgccggagtatccgttgtggtgctcgtctgttcttcgtcggaacgaatatccgcagcacggatgcttggcagcttacgaatcagctgttcggcagcacggtcgtacatctcttttacgatcatgtcttgttcgttatctttcgctaacgccatttgcgggttatcgaagaagctacggaagactttggcgctaatcgggtagatatcacggccggggatcaacacggtcgcattaaccgtcatgatcatctgatactctgctgtttgaccgttacggaatacgcttgcggtatctttcgcgatgctcactttacccaaacgcaaggatggaacgtccttacgcgtggtttctttatcaagcaactcgacaccattcagacgtaactggttacgcaccgcacggcttaatggcccgttcggatcgccactgtccaggatcatgaccttcatagtggaaggaacctgcgtggtatcacgcagatgccagccacacccggcggtgattaacaccgccagagataacaacaatgttgccagatatcgcacgcttcctcccgcgcttagccaacgaccagattgaggagtttacctggtacgtaaatcactttacgtacagtaacgccatcaagatattttgctaccagatgttcctggccagcacgttcgcgaacctgttcttccgttgcgtccaccggaacggtgattttggcacggactttaccgttaacctgcaccacgaccagcgtggagtcttccaccatcgctttttcgtcagcaaccggccacggcgcgttgtcgatatcgccttcgcctttcagttcctgccacagcgtgaagcagatgtgcggggtgaacgggttaagcatacggacaacggccagcagtgcttcctgcatcagagcgcgatcctgctcgccatcggttggtgctttcgccagtttgttcatcagctccataatcgccgcaattgcggtgttgaaggtctgacgacggccgatatcatcggtcactttagcgatcgttttatgcacatcgcgacgcagcgctttctgattttcagtcagcgcatcaacgttcagtgccgcaacatcaccttttgctgtgtgctcgtaaaccagtttccagacacgtttcaggaagcggttagccccttccacaccggattcctgccattcgagagtcatatcagccggagaagcaaacatcataaacagacgaacggtgtccgcgccgtaacgttcaaccatcacctgcgggtcgataccgttgttcttgctcttggacattttgctcatgccggtataaaccagttcatggcctgccgcatctttcgctttcacgatacggcctttctcgtcacgttcaacgatagcatcaaccggggaaacccagttacgttcgccgttttcgccaacatagtagaaggcatctgccagcaccataccctgacacagcaactgtttcgctggttcgtcagagttcaccatgcctgcatcacgcatcagtttgtggaagaagcggaagtagagcaggtgcataatggcgtgttcaataccaccaatgtagatatccaccggcagccagtagttagccgcttcggaatccagcataccttctttgtactgcgggcaagtgtagcgcgcatagtaccaggaggactccataaaggtgtcgaaagtgtcggtttcacgcagtgctggcataccgttaacggtagttttcgcccactccggatctgctttaatcgggctggtaatgccgtccattaccacatcttccggcaggatcaccggcagctggtcgtccggggtcggcattacggtaccgtcttccagcgtcaccatcggaatcggcgcgccccagtaacgctgacgggaaacaccccagtcgcgcaggcggtagttcactttacgctcgccaacgcccatcgcagtcagtttatcggcgatggcgttgaaggccgcttcatggtcaagaccgttgaactcgccagagttgaacagcacgcctttttcagtcagggcttgctgagaaagatctggctcagagccgtcagctgccaggataaccggtttgatgttcaggccgtatttagaggcaaactcgtagtcgcgctggtcgtgccccggtaccgccataactgcgcccgtgccgtactccatcaatacgaagtttgctgcccaaacgggaatttcttcgcccgttaatgggtgaaccgctttaaagccagtatcgacgccttttttctccatcgtcgccatttcagcttcggcaactttggtgttacggcattcgtcaataaaggccgccagttcaggattattttccgccgctttctgcgccagcggatgacccgcagctaccgccaggtaggtacaacccataaaggtgtccgggcgggtagtgtaaacggtcagcgtgttgtcatagtcgttaacgttgaaggtgatctccacgccttcggaacgaccgatccagttacgctgcatggttttaacggtgtctggccagtgatccagtttatccagatcgttgagcagctcgtcagcgtaagcagtgattttgataaaccactgcgggatctctttacgttcaactttggtatcgcagcgccagcagcagccgtcgataacttgttcgttcgccagtacggtctggtcgttcgggcaccagttgaccgcagaagtcttcttatataccaggccttttttatacagctcggtgaagaatttctgttcccaacggtagtattccggcgtacaggttgccagctcgcggctccagtcataaccaaagcccagcattttgagctggtttttcatatacgcgatgttgtcgtacgtccacggtgccggagcggtgttgtttttcaccgccgcgccttccgcaggcagaccaaacgcgtcccagccgatcggctgcaggacgtttttgcccagcatacgctggtagcgggcgatcacgtcaccgatggtgtagttacgtacgtggcccatgtgtagtcgaccagaaggatagggaagcatagacaggcagtaatacttctctttgctctcgtcttcggttacttcaaatgtgcgcttctcatcccaatgaagctgtactttggattctatctcttccgggcggtattgctcttgcatggcagccagtggtcctgttttcaatacggctacaaatgtagcgttgaggtggtttttcagatccgcatagcatagcccaaacgtccgcgtcaaaacagcctttcgcgcactcgacgttgaaatgatgcccggattattcatacattaatttacagagtttgtgggcgtattagcaaagcaaggaacaaagaacgtctattattatagtcagttaacgacccgggagatgaaacgatgaacaaggttgctcaatattaccgtgaactggttgcgagtctgagcgaacgcctgcgcaatggcgaacgtgatatcgacgcactggtggaacaggcgcgcgagcgcgtaataaaaacaggggagttaacgcgaaccgaggtcgatgagctgacgcgagctgtcagacgtgacctggaagagttcgccatgagctatgaagagagcctgaaagaagaatctgacagcgtctttatgcgggtgattaaagaaagcttgtggcaggagctggcagacatcaccgataaaacgcagcttgaatggcgcgaagttttccaggacctcaatcatcatggggtttatcacagcggagaagtggtcgggctgggaaatctggtctgcgagaaatgtcacttccatctcccgatctacacaccggaagtgctgacgctatgcccgaaatgtggtcatgaccagttccagagacgcccgtttgagccgtaatagtctgatttcgcacagcaataaagagaatatgggccgaatgaaattccccggcccttgtttttatctttacagtaaatcttcagtctcacgaatttcctgactgacatctctggttccggaactctgaactttacgatacaggtcgagagcctgtcggagatcgacaggtcttccttctccgtagtgatacataatggccaggttataccaggcagtggcgtcattgcattcagcggctttcgtaaaccattcaaaggcagcctgataatctttctcaacgccttgtccgtgtttatacatataaccgatgttgacgtaagcgccgacgctcccctgagcggcagccttcagataccagtacatcgcttgcttatagtcctggtccaccccttcgccagcgttataatcccatgcaatttgaaactgggcgtgccgattaccctgctgtgcgcttttcaaataccagaatgcggcgagtgtcttgttttgagcaacgccttttccgtcttcataaagatcggccagattgttttgcgcgtcactatggccttgtaatgcagcttgtttgtaccagaaaaatgccagcgcatagtcttttgcgactccgttgccatttctgtacatccacccaagattattttgcgcataagacattccgctctccgcggctatctgataccagacaaccgcttctttataattgggggcttctccacgatccagtgtccagccaagggcgttggaagcgaaagtatggccttgtagggcagcttttttcagccagaagatggcttgctcattatctttatgacggcttttatcctcggtatacttttgccctaaggaatactgtgcttcacaatgaccttgctcagcggccagcttcagccagtaaaaggctttttcgtcgtccggagaatcaattgcgctatcgcgattataataaaacccaacaatatattgagcctcgcaatcgcctttttcagcacgttcgataatctcatctatacttaaattatcgcagcaactactcgtgaaaatcattatcatttccttatggttgcagataaaacatattatatttttatgtgttccatttttgcgtaagccttattttatgcgtattatgtcgcgtcagaaaagtataaataaacgagcctcgcaatgcggctaatattcatttaatgaatatttaaggataaattatatggacatggagagccaaaaaatattgtttgcactttccactccgatggaaatacgcaatgaatgctgtttacctagccatagtagtcccaaaatgtatttaggtacatgcttttttgacctttcttccagttggggaattgatgaccgtgatgacctgctgcgcacaattcaccgaatgatcgataacggtcatgccgctcggttggcagggttttatcaccgctggtttcgttatagcccatgtgaatggcgtgactatcttgctgaactaaatgagcaaggtcaggcttatgcgcaatttgtcgccagcaccgccgaatgctgtggcgaagggggaatcaaagcctgggattatgtccggatgggttttttaagccgaatgggcgtacttaataactggttgagcgaagaagaaagtctatggatccagagccgcattcatctacgggctctacgttattatagtaactggcggcaatactttgccggttatacctttggtcggcaatattggcagtctcccgaagatgatcatctgcctttattacgcgaattcttagcgcgtaaagaatacgacgattccggcaatgatatgttttatcaattatttgccagtgatgatgcgtattaccctaccttgtcctggcaaccattggcttactattctgcatgcccggaaacgcttaaggatatgagcgacctatgaaaaattgctggaagatcctcgatatagaggaaacgactgacgtcgatattatccgccgcgcttatctggcgctgttaccgtcctttcatccagaaaccgatccgcagggttttaaacaacttcgtcaggcgtatgaggaggcgctacggattgcgcagagccctgctaaatctgtttggcaaccagaagaatatgaggtagcagaacatgaaattctgctcgcctttcgtgcgttacttgcctctgatagtgaacgttttctgccctccgcctggcagcgattcattcagcaattaaattattgcagcatggaggagattgatgaattacgctggagcctgtgcacaatcgccatgaacactgcccatttatccttcgagtgcgtggtgttattagcagaaagattgcggtggttacaggaggaaaataccggggaaatagacgaagaagaactggaatcctttttatatgccattgcgaaggggaatgtttttaacttccagaccattctgcatctgcccgttgccgtgcaaaatgacaccatcgatttttaccaaatgttcgctcggatttggagtagccatccacaatggctgacattgtatttagcgcaacatcgcgcagtgattatccccgatgatgcaaaactgcacagaaatttactccgctggtatagcgcaggtcgcctggatatccccgaacttctggattacgcccagagttggcgggaaactgaacctgataatgaagatgcgccttattatgaatacgcgcaacgcgtctattgtggagaaggcgaaagcctgttggcagaactttgtgactactggcgcgagtatccctccacccaggcggatgctttaatgttgcaatggtgccgtcagcatcgggtcgattattacccattactggtgatgatgattgaagcgcgtgatctggttaacgatcagggaaaaccgctactttatgtccccggcgacagcgcccgtacgcgttttcatttatacgaaatactcagcgatgaaaaactctctgcgctggggcgtagtctggtcgagatggttttgcacaaaggacgtaagccgcggatcagtctcacgcgtgatacagaacataccttatggccattatatctagttgccaaacaattagtgcaggcctgccaacctacagaagaaagtttaatgccgattgtgagccgccttgatgcagaaaatcgttgtccactggaagcattaattattcgtcgattattaattcaggcggcgaattttaccgagaagcaaactgttgaaccggagccgcaaccgcagccaatgcccgttgacgatggtgggccaggctgtctgggcatcattaaaattattttctatatttttatctttgctggtttgatagggaaaatactccatctgttcgggtgacagtcgacgttaatgtgcgggaagcccggcaagtaatctttccgcatttttgtaatgttgtttggcggtcagttttaaccatttttgagattcataatggttaacattaataccactgccatttctgtagatcaaacctaaagtatattgagcatgagcatacccttgttcagctgcttccttataccagagaattgctttacgggtgtcgggtttgacccccagacctttgaggtagatccaccccagtttactttgcgcgcgtggattttcctgttccgcactttgctcataccagtatctcgcctgtgtataatccagtggtttaccgtcgctaccatgaagataaaattctccaaggcgatattggctcgtactgtgaccatgaatcgcggaaagctccgtggctgccgtggtgaatggaagactgcccggactgcttaaataatcaaaggcataattcaccatggctttatcacgcaacgtcgttttcttgggttggctaatacaggtaattgctgcaactataaaaattgcgaatatatacattaattttttattcatgtgtgaatgcttcgattttctttttattttgaaagcgtcaagtttatactcatcaataataaaaaagtagtcagttaatgcacttaagggattattaacaaatgaataaggaagaacaatatcttctttttgcgctttctgcgcccatggaaatacttaatcagggttgcaaacccgcgcatgacagcccaaaaatgtatactgggataaaagaattcgagctcagtagttcctggggaataaataatcgtgatgatttaattcagactatttatcagatgactgatgatggtcatgccaatgatttagctggcttatatctgacatggcatcgctcttcccctgaagagtggaaagcattaattgctggtggcagcgagagagggttgatttatacccaattcgttgcccaaaccgctatgtgctgtggggaagggggaatcaaagcctgggattatgttcgaatggggtttctgagtcgggtcggtgtgctcaacaagtggctgacggaagaagagagtttatggctgcaaagccgcgtctatgtacgagctcaccattactatcacagctggatgcactatttttccgcctatagcttaggacgtctctactggcaatcttctcagtgcgaagacaacactagcctacgcgaggcgctaaccctgtacaaatacgatagcgccgggagtcgtatgttcgaagagctggcagcgggaagcgatcgtttctatgccacgcttccctggcagccattaactgtccagtctgaatgcccggtaacgcttaaggatgtgagcgacctatgaaaacatgttggcaaatcctcgaaattgaaagcacgacgcaaatagacattatccgccaggcttatcttgctcgcttaccgttgtgtcatcccgaaaccgatccgcaagggtttaaagcattacgccaggcctatgaagaggccctgcgactggcggtaaatcctgtcgaggaagcagatgatgaagaaaaagatgctgccgctgaacatgaaatactacgtgcattcaggacattactggatagtgaaagtgatcgttttcagccttccgcctggcagaaatttattcagcaattaaatacctggaacatggaggatgtcgatcaattacgctggccgctgtgtgcaatcgccatagaagcgcgatatcttagtttaaattgtgcttctttgctggcagagcgtttgaactggcatagttttaatgacagcgaaggaatggatgaggaagaaagggaggcttttcttgaggccattcaggctggtgattgtttcgatttccttagccttctggaatatcccattgcgttgcagaaccagactgttgagtattacttcgcgctggaacgttgctgccgttaccatcctgactatgtcactgcgtttttggcgatggaaggtccgtggttaattcctgatgatgcaaagttacatcgcaaactgttgcgctggtacagcagcgtgcaaacaggtatggcggaactcattcctgtcgctcaacagtggcaaacggaagaaccagaaagcgaagatgcccggtattacttgtgtgcacaacgtttgtactgcggcgagggggaaagcctgcttgccgatctctgcgcgtactgggaaagttacccatctacacaagctgataatttgttgttgcagtggagcaagcgtcattgcccggattatttcgcgttattagtgatggttatcgaagcgcggagcatggtagatgcgcaaggtcaaccgctgaaatatgttcctggtgagagcgcccggacgcggctgttatgggcggagattttacatagcggaaaattaagcccgttaggtcaaagctttattgagagcttattcttcaagcgcaaagcatgggcgtggtggaaaagcagagtcggtagcgagacagagcaagatagtccgttcctggatttgtatcgggtagcggaacaggtagtacttgaagcgtttccgaaacaagagatgctggcccgtcttaatacaaggctggaaggcggagatgctcatccattagaggccattgtcacccggatgcttttgacgaaagtgaaactcgagccggaggatgaagatgtcgatgagccaacacctgaaaatcatgaagaaaaaaatgatgagggtgaaaaaccacagagcattaccagcattatcaaaatcagtttaacggtgctggtgataggttatgctctcggcaaaatcgcgatgttgtttagctgacgatgtgttttttgcgccgatgccggatgcagcgtttacgccgcatccggcagccgtgtttatgggatctcaatggctaaataatcgctcgcccgccgccgaacttcatccacgcgggccatatcgttactctgcaacgccgcatcaaaatcggtgatcacccggccgatctcttctcgctcgtcacccagcgcccgcgcccacaactcttccagtttggctttaaaggtgcgattgatgagcatatcgcgcggataaattttcaatgcggataaccgcgtccgactctcttcaatctgctgcgcgctcaatgttaccgggctgtggttaatcactctggacttaacgctgccgtcttccagaagcacgtcaacttcaagcaacccgttgatatcataactaaagcgaatatcaatgctctgataagccccggttttcttcaacggcacatcgaaggattccaccagaatgttgtttttaactttgtggttttctccctgatagacgttaaccgtaatactatcctgttccgggtgcatggtactataagtttctacacggctcacgggcacagtggtgtttcgttcaataatcgggctgaaaatgccggaaacgccctggcggttaacttcaacgcccaagctgtaagggcaaatatcagtgaggattacctcttcaatatcttcactgcgtaagcggcaggcggcctggattgctgcgcccagcgcgacaatggtgctcggatcgtaactttgatacggtaatttgccaaacagacgcacggcgattcgctgcaccagcggcatttgactcgcgccgccaaccagcaccagactgtcgatttgactcggcttcagacgcgcatcgcgcaacgcctgttcaatcggcactcgcaagcgattgagcagcggcaaccacaaatcttccagttcgttctcgtaaaattcgcattcccgcgtttcttcctgatactgccagcgaatgtgcaatgggctttgattgctacattttgccgcttccacacaggcgtacaaggctgccagttcactctcgttaagcgtggtcctggcgacatccgcgcgttttaaaacctcatcgaccagcatatgggtaaaatcttcgccaccaagaaagttgtcgccagcggaggcgtgaacttcaatcaccggcgtggcgtactcaagcaccgtaacgtcaaacgtgccgccaccgagatcaaacaccaggctacgggtattttgttgggtatgcaggccatacgccatcgcagctgctgtgggttcattaattaagcgtaccgcatttaacccggctaactccgctgctaaacgggtatgcttgcgttgttcatcgctgaaataagccggaacggagatcaccacatctttaatcggacgttgcagaaattcttcggcatcttcttttaaactgcgtaataccaaagaggacagttctggcgcgttaaatgtgtcgctgcctaaccgccagttggtattactgcccattgcacgtttaaataacgctgccgttttatccggatggctagtacgccgacttacagccggttttccgactaaaatatgattattttcatccatgctaattatggatggtgttaaatattcaccgaacttatttggaattaattgcgcggcaccgtctttccagacggcaattaaactattggtagtaccgagatcgataccaatggcgagttctgcattatccattgcatttatatcttgaaagaaaaagagataaacagattaagaccacccaggtaacgcgtggtgatcttaatcaatgacgtgtgttaagcgtaaaatttcagacgatcagccagtaaatcaacaaagccctgacgatcaacatcgaccattacggtggcattcggtttattgcctgtcagataataataatcaacaaccgtcataccctgggtatatttcccctgtgtttccacgccaacccagcgctcaacagaggtaaataactccggtttcaacagccaggcgatggtgcatgggtcatgcagtggtgcgccgacaaagccccatttttcgtctttatgatattcgaggaagaaatccagcagttcggcaacaatggtactaacagggttaccaatcgcgcggaaacgctcggtgtcttcaacgtggatttgtgctttatgagtaacatccagaccggccatcaccaccgggatcccactctggaagacaatttctgccgcttccgggtcaacgtaaatattaaattcagccgcaggcgtccagttacccagccccatagcgccacccataatcacgatacgggcaattttgctatgcagttccggatggctattgagcagcaaggcaacgttagtttgcggtccggtagacacaatggtgacaggttccgcactttcacgcagcgttttcgccatcagctctaccgccgtacagttttgcggtgcgaatgtcggttccggtaatgccgggccgtcgagaccgctttcgccgtgcacattgtccgcgataatcaactcacgcattaacggttttaccgcgccgcctgctaccggaatatcggtgcgattaagcaaggtcagcatacgcagaacattgcgtaaggttttttctggtgtctggtttccggcggaagacgtaattgctttgacatcaagctctggactggcgagggcgagaactattgcgatagcgtcgtcatgacctgggtcgcaatctaacagaattggcagtgccattgttgctccttgttgtgtgcttctttgcgacaagggtaacgccaggatgtaacagatacgaggggcgaaacgataaagcgtgagatggcgcgcaattgggtatgcgcgccagagtgattaatgcaggattttcgcgaggaagtcttttgcgcggtcgcttttcggatcatcgaagaaagcgtctttcgggctgtcttcgacaattttaccctcgtccataaagatcacccgattcgccactttacgggcaaagcccatttcgtgggtcaccaccatcatggtcattccttcgttcgccagttccaccatcacgtccagtacttcgttgatcatctccggatccagcgcgcttgtcggttcgtcaaacagcatcgcaataggatccatacacaacgcgcgagcgattgccacacgctgctgctgaccgccggaaagctgcgccggaaacttattggcgtgagcagaaagcccgacacgctccagcagtttcagggctttttcacgagccggcgctttatcgcgtttaagcactttcacctgcgccagggtcaggttttcgataatgctcagatgagggaacagctcgaaatgctggaataccatcccgacgcgggaacgcagctttgccagatcggttttcttgtcgttaaccacgataccatcgacggtgatttcaccttgctgcaccggttcgaggccgttgacggttttaatcagcgtacttttgccggaaccagacgggccgcaaaccaccaccacttcgccttttttcacttcggtactgcagtcggtcagcacctgaaagtgaccataccatttactaacatttttcagggtaatcattatgctgtccttcttttcaagtagctgaccaacaagctcgcgctaagactaataacgaaataaacaaatccggcaaacaggatcatctcaacctgcgtaccatcacgctcaccaatggtactggcggtacggaagaaatcggccagggataacacatacaccagactggtatcctggaacagtacgatgccctgagtgagcagcagcggcaccatcgcgcggaacgcctgcggcagaataatcagtttcatgctctgccagtgagtcattcccaacgccagcgcggcgctgctttgaccacgagaaatactttgaataccagcacggataatctcactatagtaggccgcttcaaacatgctaaacgccaccatcgcgctaattaaacggatatcattttttgggcttaatcccagcacgttttgcagaaaacccggcacgatcaggtaaaaccacagcaaaaccataactaaaggaatgctgcggaatacgttaacgtaggctttggcaaaccacgccacgggcgcaaagctggataaacgcatcaccgccagcatcgtgccccacaaaataccaatcactaccgccgtgacggtgattttcagggtgatcaccagcccgtcgagcagatatggcagggaagggacaatggaactccagtcaaactcgtacattatttgccccccatgttgccaggcaggcgaactttacgttcaaccagcgtcatcaccagcatgataaaagcgttaatcaacacatacgccagcgtaatggcggtaaagctctcccaggcatgggcactgtaatcgagcaatttacccgcctgcgccgccatatccaccagaccgatagtgctggcgatggcggagtttttcaccaggttcatcatctcactggtcatcggcgggacgataacgcgataagcattaggcagcagtacgtatcgataagcctgcggtagcgtcaggcccatcgccagcgcggcatttttttgccctcgcggcaggctctgaatcgcggcgcgtacctgttcgcaaacacgggcggcggtaaacagccccaggcagagcatggaactaaggaaaaactgaatattgggatccagctcggccttaaaccacatgccgattttctccggcagcagctccgggatcaccagataccaggtaaagaattgcacaatcaacggcacgttgcggaacagttcgacatacaacgtacccagaccagagagaaaacggtttggaacggtacgtaaaatgccgaaaaaactaccgacgaggaaagcgataatccaggcgcagatgctcaaagcgatcgtcacctgaaaaccactccagatccaaccaagataggtggtgttgccgaacggggcttgttgtaaaaaaataccccagttccagtctatagacataaatctactccagaaaaaagagggtagcagcgttaactgctaccctcgaagattgttacccagcgtattgcggttttcaggcccgatggggaacgaccatcaggcgtatagtctgtccgtgctacgtaacaatcgagagggctggaatttccgcccctggttcttgtaattagttcagtgccttgtcattcggttctttgaacagtgctttcatttcgtcactcagttcgaaattcatgttcaggtttttcggcggaattggatttttgaaccacttatcaaaccatttttccgcttcaccggaggtctgcacctgagcgatggtgtcatccatcagctttttgaactgcggatcatctttacgcaacatacaaccgtaggcctcctgagactgcggcttgccgacgatttcccagttgtctggtttcttcgctttcgcacgttcaccggccagcagagcgtcatccatcataaaggcaacggcacgaccgctttccagggtgcggaaagagtcaccgtgatctttggcgctgatgatgcgcatattcattttttgctcttcattcagtttgttgagcaaaacttcagaggtagtgccggaagtgacgactacggctttgtctttcaggttggcaaaatctttgatatcgccaccctttttggtcaacaggcgcgtaccgaccacgaaaatagtgtcagagaaagccgcctgtttttggcgttcgacgttgttggtggtagaaccacattcaaaatcgaaagtgccgttttgcagcagtggaatacggttttgactggtaatcggaatcagttttacctgcaagtccggtttgttgagtttctttttcactgcttcaacaatggcgttggagtaatcctggctgtaacccaccactttttgctgattgtcgtaataagagaaaggcacactagattcacggtgaccgacgacaatcacaccgtttttggcgattttgtccagagtactgcccgctgccggggcggcgtcatctgcctgtgccagtcctgcggaaagcgccagggcgaggattgctgtggcaggtttacgtaattgcatatccaactcctttatcttctgcgttaagaacgcatggatacccgttgtgagtgtttgtgttgttatcgtctgcaactttattgtgcagtgttgtgcctgttagggaaggtgccttaggtaacatttagtttggctaaatgtaaagatattgctgttttattgtttgtttttgcgagatgcgccgcaccattccgaagcaaaattcttaaaatgcactcttttagtgctaccgctggattactgtggtgcaactaggttgtactgatgctgtttcagggtttgccttgtataacaaagcaatagatgtgccaaagttggataggagaatattgttatccggataatgcactgatgccgcatccggtgagcgtgccgaaatatgggatgtattccggcacgataagaagggattatttacgtcgctgacgcagactcatcaacacagcagcaaaaccaaacaatgccgtcagcacccacagcggccagttgccggtacgtgcgtatggtgtgagtccggtggtcggcgtcacgttagtggttaacacctcgcgggtgaactgcgggatcatcgcctgaatctcaccctgcgggccaatcaccgccgtaatgccgttgttggtgctgcgcaacagtgggcgcgccagctccagcgcacgcattcgcgccatctggaagtgttgccatggaccaatagatttaccaaaccacgcatcgttggagatagtcagcagatagtcggtatccgggcggaagttatcgcgcacttgctcgccgagaatgatctcgtagcaaatagccgcagtaagctcaataccatttgcgctcagcggcggctggatatatggcccacggctgaagctgctcatcggcagatcaaagaacggtgctaacggacgcagaatgctctccagcgggacaaactcgccaaacggcaccagatggtttttgttatagcgatcggcactttcgtagctgtacggcgcacctttacccagcgtgatgatggtgttgtaggtatcgtagcggttctgcttattgagacgcgcgtcgacaatcccggttaccaggctgctacctttatcacgcaactcaccgtccagtgctttgaggaacggttgctgattaatttccagatcggttatcgcgctctccggccagataatcaagctacttttgcccatcagcggtgccgttgcgttgtagtaaatcttcagcgtattaagaagctggccttcgtcccatttcaggctttgcggaatatcgccctgaaccatgctaacctgaatggttttctccggttgtggggtaaaccactggatgtaacgcagcgggaagggaagggcaaacagcacgacggccaccaccagcggacgccagttgcgtttgaccaacgccagtgccagcaggccactaaccatcatcagcaggaagttaatggcttccacgcccattatcggtgccagcccttttaacgggccatcaatctggctatagccgaactgtaaccacgggaagccggtcagtacccaaccgcgcagaaactcggtcacttgccagagggcaggggcggcaatcgctacgcgcagccaggtggttttcggccacagacggctcagcacgccagcaaacagtccggtatacaggctcaaatacgccgccagcagcaccaccaggaagatgttaaccgggccaggcattccgccaaaggtcgcgatgctgacatagacccagttaataccgctgccaaagaggccaaatccccagcaaaagccaatagcggcagactggagtggacggcggttaaaggtcaacgcctgaagccccatcaggctaataatcgccgcaggccagacgtcgtaaggagagaaggccagcgttccgcaggcaccgaataataacgccagcagcaggcgaatgcgctggcgttcaattaaactggcaaaagccatgtagttatctatccagtttcggttttattcatccagcttcggctggggactgtcatccgggattttgacatgaacctgaataatacgccgactgtcggccatcgccactttgaactggtaaccgtcgatgtcgatagtttcgccacgcgccggaagatgcccaaatgcctgcatcaccagaccaccgatagtgtcgacttcttcatcgctaaagtgggtgccgaacgcttcgttgaagtcttcaatggaagccagtgcgcgtacggtccaggtatgacgactcagctgacggaagtcgatatcatcttcttcgtcatactcgtcttcaatctcaccaacaatcagttccaggatgtcttcaatggtcaccagaccggaaaccccaccgaattcgtcaataacgatcgccatgtggtaacgctgagagcgaaactctttcagcatccggtctacgcgcttactttcaggaacgacaaccgcctgacgtaacactttgtccatgctgaaggcttcagcatcgctgcgcataaacggcagcaagtctttcgccatcagaatcccttcaatgtgatctttgtcttcgctaatcaccgggaaacgactgtgggcggactcgatgatgacatcaagacattcgtccagcgtctggttgcgtttcagggtaatcatctgggagcgggggatcatgatgtcgcgaacgcgttggtctgcgatgtccatcaccccttcgagcatatcgcgcgtatcttcgtcgataaggtcgttctgcccggaatcacggatcagcgccagcagttcgtcacggtttttcggttcaccgtggaaaagttggctgagtaacagggagaaaaatcccttcttgttgcttatcgtgtcactactgtgactattgtcgtcgctcatggcgtcgtatgggttctcatgttagttaatcaaaacgccgtcgttaatcaccaacggcggggacgtctgccagtcaaatgcctggcaaattattctttctcggcaatgtacggatcctcatagcccagagcaagcataatctctgtttcgagggcttccatttcttctgcttcgtcatcttcgatgtgatcgtaacctaacaaatgcagactgccgtgcaccaccatatgcgcccagtgcgcctccagtggtttgccttgctcctgagcttccttctcaaccacctgacggcagataaccagatcgcccagtaggctcatttccatgccaggcggcacttcaaacgggaaggagagcacgttggtcggcttatccttaccgcgataggtcagattcagactgtggctttcggcggtatcgaccacgcgaatcgtcacttcgctttcttcctgaaactgcgggatcaccgcattcagccatgtctgaaactggctctcttccggtaacccggaattatcttcacatgccagttgtaaatcgaggatcacctgactcatttttgttcctgttcttcgcgcttgcgttctgctgccagcgccgcttttcgtttttgttcggcttcttcccaggcttcataggcgttaacgatacgcgccaccacagggtgacgaaccacgtcttcgctgtggaagaagttaaagctgatctcttcgacatcggccagcacttcgatggcgtgacgtaagccacttttagtattacgcggcaggtcgatctgtgtgacgtcgccggtgataaccgctttactgttaaaaccgatacgggtcaggaacatcttcatctgttcgatggtggtgttctggctctcatcgagaatgataaacgcgtcgttcagcgtacgaccacgcatataggccagcggtgcgacttcaataacgttgcgctcaatcagtttctcgactttctcaaagcccagcatttcaaacagcgcgtcgtacagcgggcgcagatacgggtctactttctggcttaaatcgccaggcaggaagcccagtttctcaccggcttctactgccggacgagtcagcagaatacggcgaatttcctgacgctccagggcatcaactgccgcagccactgccaggtaggttttacccgtacccgccgggccaacgccgaaggtaatgtcatggtcgagaatattggcgatgtactgcgcctggtttggcgtgcgcggcttaattacgccgcgtttggttttgatattgaccgctttgccgtactccggcacgctctccgcgctttgctccagtacccgcgcttctttaatcgcaaggtggatctgttccggttcgatatcctgaatctgaccgcgcatcggggcagtatcgacatacaggctacgcagaatgtctgccgcagcggtgacgcaaatcggacggccggtcagtttaaagtggttatcgcggcgattgatctcgatgccgagacggcgttcgagctgcttgatgttgtcatcaaacgggccgcacaggctcaacagacgcgcattgtctgctggctccagggtgatttcgcgagtgtctatgttcaaaccgttcctcttatctgtatgccgccggaagctgaacattcaccggcctataaggaaattattcacgccacaggaaaaaggcgcaagcattgcaataaagatggggataaagagagaaaaaacaaggcccaccggaacggcaggcctgagaattacggctgataataacccacgccaaggtcgttttctttgcgggtacgggcaatcacactttccggtgtttctgccacgcgcagacccatttcatcttcagtacgcaccactttaccgcgcagagagttcgggtagacgtcggtaatttctacatcgacgaatttaccgatcatatccggcgtgccttcgaagttgaccacgcggttattttccgtacgcccggaaagctccatgatgctcttacggcttgtaccttctaccagaatacgctgggtggtgccgagcatccggcggctccacgccatcgcttgctgattaatgcgctcttgcagaatatacagacgctgcttcttctcttcttccggaacatcatcaaccatatcggcggctggtgtacccggacgtgcagagaagataaagctgtagctcatgtcgaaattgacgtcggcaatcagcttcatcgttttctcgaagtcttcggtggtttcgccagggaagccaacgatgaaatcagaactgatctgaatatctggacgcgccgcacgcagtttacggatgatcgctttgtactccagcgccgtatgggtacggcccatcaggttcagaatgcgatcggaaccgctctgtaccggcagatgcaggaagctcaccagctccggcgtgtcgcgatacacttcgatgatatcgtcggtgaattcgatcggatggctggtggtaaagcgaatacgatcgatcccgtcgatcgcagcaaccagacgcagcagatcggcaaagcttccggtggtgccgtcgtagttttcaccacgccaggcgttcacgttctgaccgagcaggttgacttcacgcacgccctgagccgcaagctgggcaatctcaaacagaatatcgtcggacggacggcttacctcttcaccacgggtgtaaggcaccacgcagtaggtgcaatatttattgcagccttccatgatggagacaaacgcggtcggcccttcggcgcgcggttccggtagacggtcaaacttctcgatttccgggaagctgatatctacaaccgggctgcggtcgccacgcacggagttgatcatctccggcagacggtgcagcgtttgcggcccaaaaataatatcgacatagtgggcgcgctggcgaatgtgctcgccttcttggcttgccacgcagccaccgacgccgataatcaggtctggattcttctcttttaacagtttccagcgacccaactgatggaagactttttcctgagccttctcgcggatactgcaggtgttcagcagcagcacatccgcttcttccgccacgtcggtcagttgatagccgtgggtggcatccagcagatcggccatcttgctactatcgtactcgttcatctgacagccccaggttttaatatggagttttttggtcatcgacttgctcttgcgaaatagtagccaggaatgcagggcgcatagtgtaatgctttgctgccgttgtgaccagtatgagcgttatcagcccttaggggtaaaaatcctgtaaacttaaagcatattgctaacaggatgattgaccatgacaaatcaaccaacggaaattgccattgtcggcggaggaatggtcggcggcgcactggcgctggggctggcacagcacggatttgcggtaacggtgatcgagcacgcagaaccagcgccgtttgtcgctgatagccaaccggacgtgcggatcagcgcgatcagcgcggctagcgtaagtttgcttaaagggttaggggtctgggatgcagtacaggctatgcgttgccatccttaccgcagactggaaacgtgggagtgggaaacggcgcatgtggtgtttgacgccgctgaacttaagctaccgctgcttggctatatggtggaaaacactgtcctgcaacaggcgttgtggcaggcgctggaagcgcatccgaaagtaacgttacgtgtgccaggcagcctgattgcgctgcatcgccatgatgatcttcaggagctggagctgaaaggcggtgaagtgattcgcgcgaagctggtgattggtgccgacggcgcaaatagccaggtgcggcagatggcgggaattggcgttcatgcatggcagtatgcgcagagctgcatgttgattagcgtccagtgcgagaacgatcccggcgacagcacctggcagcaatttactccggacggaccgcgtgcgtttctgccgttgtttgataactgggcaagcctggtgtggtatgactctccggcgcgtattcgccagttgcagaatatgaatatggcacagctccaggcggaaatcgcgaagcatttcccgagccgtctgggttacgttacaccgcttgccgctggtgcgtttccgctgacgcgtcgccatgcgttgcagtacgtgcagccagggcttgcgctggtgggcgatgccgcgcataccatccatccgctggcggggcagggagtgaatcttggttatcgtgatgtcgatgccctgattgatgttctggtcaacgcccgcagctacggcgaagcgtgggccagttatcctgtcctcaagcgttaccagatgcggcgcatggcggataacttcattatgcaaagcggtatggatctgttttatgccggattcagcaataatctgccaccactgcgttttatgcgtaatctcgggttaatggcggcggagcgtgctggcgtgttgaaacgtcaggcgctgaaatatgcgttagggttgtaaccttacaacattgccggatgcgtgccaaccgtaggtcggataagacgcggcagcgtcgcatccgacattgaaggataagacgtgtcaacatcgcattcgacattgaatgaacgcagaaaagcaaaaagctcgccgaagcgagcttttttaatgtggctggggtacgaggattcgaacctcggaatgccggaatcagaatccggtgccttaccgcttggcgataccccaactgggtgcacttacaaggtaagcgtcttgaataaattggctggggtacgaggattcgaacctcggaatgccggaatcagaatccggtgccttaccgcttggcgataccccaacaaattggttttgaatttgccgaacatattcgatacattcagaatttggtggctacgacgggattcgaacctgtgaccccatcattatgagtgatgtgctctaaccaactgagctacgtagccagattgtttcttcgatggctggggtacctggattcgaaccagggaatgccggtatcaaaaaccggtgccttaccgcttggcgataccccaataaccgggcggtgaaccgcttactcgaagaagatggctggggtacctggattcgaaccagggaatgccggtatcaaaaaccggtgccttaccgcttggcgataccccatccgtacaacgctttctggtgaatggtgcgggaggcgagacttgaactcgcacaccttgcggcgccagaacctaaatctggtgcgtctaccaatttcgccactcccgcaaaaaaagatggtggctacgacgggattcgaacctgtgaccccatcattatgagtgatgtgctctaaccaactgagctacgtagccatcttttttttcgcgataccttatcggcgttgcggggcgcattatgcgtatagagccttgcagcgtcaacctctttttcaaggaaaattgctcgaaagtgactgtttggttaggttgcgaacagcgtggcgctatattcgtcaattattgtttactttgtgttttttcccaccctacagccattcttttgtcatacaggatgaaattcggaatttaacaatagtggtgggaaattaatctatgaaatactggcctacagtgatgagttgtcaaacagtgatgtggcaaacccggaacatttccttactgcatatcagaatcaacaagcacctcaataactgaaacagccccggatttcaccggggctgtttcgcatttcttacttatacgcgctctggtgaacaccaaccgcgcgaccagacggatcgtccattttcttgaacgcttcatcccattcgatcgctttagcggaagaacaagcgacggaaggaccgcccggcacgcactcagcggcgctcggaagcgggaatagttcttcaaagatctcccgatacaagtacgcttctttagaggttggcgtgttgtacgggaagcggaagcgggcagtttccagttgctgatcagaaacctgctgcgcagccacttctttcagggtgtcgatccaactgtaaccgacgccatcggagaactgctctttctgccgccaggccacgcttgcaggcagatacgcttcaaaacattcacgcaggatgtgtttttccattttgccgttaccgcacattttatcctgtgggttaatacgcatcgccacatcaaggaattttttgtcgaggaacggaacgcgtgcttccacgccccaggcactcatcgctttgttggcacgcgcgcagtcatacatatgcagggccagcagtttacgcaccgtctcttcatgcagttctttggcattcggtgctttgtggaagtaaagataaccgccgaacacttcatcagaaccttcaccggacagcaccattttaatgcccatcgccttgatcttacggctcattaaatacatcggtgtactagcgcgaatagtggtcacatcataagtttcgatgtggtaaatcacgtcgcggatggcatccagaccttcctgtacagtgaagtgaatttcgtgatgcaccgtgcccagatggtttgccacttcctgggctgctttcagatccggactacccggcagacctacagcaaaggagtgtaactgcggccaccaggcttcagagcgttcctgatcttccacgcgacgggctgcgtatttcttggtgatagcggaaataatactggaatccagaccaccagaaagcagcacaccgtaaggcacatcagacatcagatggcttttaacactatcttccagtgcctgacgcagctcgtttttgtcggtcacgttatctttcaccgcatcgtagtcgaaccagtcgcgatgatagtaagaacggatttcgccgtcctggctccacaaatagctccccgccgggaactctttaatcgtgcggcaaactggcaccagcgctttcatttcactggccacatacagctgaccgtgttcgtcataccccatatacagtgggatgatccccagatggtcgcgaccaatcaggtaggcatctttttcgctgtcgtacagtgcaaaggcaaacatgccctgcaagtcgtcgagaaattccggccctttttcctgatacagcgcgaggatcacttcacagtcagacccggtctggaactggtaacgatcgccatattcggcgcgcaatgcctggtggttgtagatttcaccgtttaccgccagtacgtgggttttttgttggttgtagagaggttgcgcccccgcgttaacgtcaacaatactcagacgttcgtgggcgagaatggcgttatcgctggcataaataccggaccagtccgggccacgatgacgcatcaggcgactcagctcgagggctttcttacgcagctcaactgcgtctgttttgatatcgaatacgccaaaaatactacacataaccttctccgttaacctggtatttgttgcttgttgtgtttgcttgtttaaaaaaatgccgcaaagcagcactgtgcgcaagcgatttggcggtgaaaaaataaaaaacgtaatggtgattgtcgattggtgaaaaaaggtctggtgtgaggatatatttattgatgaatcgataatttttagcgggttttattgaatgtttatattttacgggggccaaattgctgacaaagtgcgatttgttcatgccggatgcggcgtgaacgccttatccggcctacaaaagcatgaaaattcaatatattgcaggagctgcgtaggcctgataagcgtagcgcatcaggcagtttggcgtttgtcatcagagccaaccacgtccgcagacgtggttgctattcagataacgtcgatttcagcgacactcgggtaaatccagctggggcggaaaggcatactgtcgatatcgtcgaggctgctaacaccagaaagcaccagaatcgtctccagacctgcctggaagccggccagaatatcggtacgcaggttatcgccgacaatcaccgtttcttcgctatgcgcctgcattttgtttaatgctgcgcggatgatccacgggctgggcttaccaacatagaacggtttgcgcccggagattttctcaatccctgcacacaacgcgccacaagcgggataaaaaccgcgcccgtgggtgtccggattggtggcgataaaacgtgcaccgttagcgacgaaataggctgctttatgcatcatgtcccagttgtaggaacgcgtttcgccaacaatcacgaaatcagggttcacatcggtaatagtgaaaccggctttgtacagttcatgaatcagtgcgccttcgcccaccacatacgctttcttgccttcctggcgacgcaggaaatcggcagtcgccatcgcagaggtataaaacacgctgtcaggtacatcgacacctgcggtggcaaagcggttcgccagatcttgcccagtctggctaggatagttggtcagcaacaccagcggcaggcctttatccataatcccgtgcaaaaattccgctgcacccggtacggcgacgttatcgtgcatcagcacgccgtcgatatcgcaaattacatttttaatggtcatggactacccagaatattgacaacaataagcgccactataaaagcacattaattttccagcaaatgctggagcaaaataccgttgagcatggcgcgttttaccagcgcaaaagcgccgattgcgctgcggtgatccagctcagaacgtaccaccggcagattagtgcgaaacgccttcagcgcctgggtattaatgcagctttcaatagcagggagcagcactttatcggcttcggtgatttcaccggcaataacaattttttgcggattaaataagttgatagcaatggcgatggttttacccagatgacgaccgacatactcaattacttcgctcgccagactatcgcctttgttcgcggctttgcagatagttttgatggtgcagtcgtccagcggcacgcggctctggtagccctgctttaacagattcaacacccgttgttcaatggcagcgttggcagcgatagtttccaggcagccaaagttgccgcagtggcagcgttcacccagcggttcgacctgaatatggccaatttcaccgacgttgccgttgcggccaataaaaatgcgcccgttagagataatcccggccccggttccgcgatggacacgcaccagaatggagtcttcgcaatcctgacttgcaccgaagtagtgctccgccagcgccagactacggatatcgtgaccaacgaaacaggtcactttaaaacgttcttccagagcttctaccagcccccagttttctacctgaatatgcggcatgtaatgaattttgccgctgtccgggtcaacaagccctggcaggatcacgctaatcgcgatcagctcgcgcagtttgcgctggtagctatcaataaactgagcaatggcattcaacagggcatgttccagcgtttgctgggtacgttccggcagcgggtaatgttcttctgccagcactttgctgctgagatcaaacagagtgatggtggcgtcatgacgaccaagccgtacgccgattgcgtggaaattgcgggtttcggtgacgatggagatagcgcggcggcccccggtggaggcctgctgatcaacttctttgatcagcccgcgttcgataagctgacgcgtaattttggttacgctggcgggggcaagctggctttgctcggcaatctgaatccggctgattggcccgtactggtcaatcaggcgataaaccgccgcgctgttaagctgttttacgagatcaacattacctatctgagcttgtccgcctggtgtcatactttctcttattgagttacgacctcgttaccgttaacgatggtcttggtgattttaaaatcaggtgtgaatgcagtcaggttggctactttacctgcggcgagtgtgccgagacgtttctcaacgccaatcgcacgcgccggatagagcgtcgccatacgtagcacttcatccagtgcgataccgcaatgttcgaccagattacgcacgccttcaatcatggttaaggaactaccgcttaacgtaccgttctcatccacacaaagtccgttacggtagtatattgttttacccgcaaaaatgaactgttcaatgttggcacctgctggcgcggtggcgtcagtaaccagacacagtttgtcgcctttcagacgtttagcgttgcgaatgttggcgtaatcaacatgcaggccatcagcaataataccgcaataaatgtcagcttcgtcgaggatcgcgcccgccaggccaggttcacgaccggtaatatacggcatcgcgttgtacagatgggtggcaaaggtaatccccgcgcggaaaccggcttttgcttctttcaacgtcgcgttggagtgaccggcagaaaccacaatcccggcatttgccagtttgctgatgacttccgcaggaaccatttccggtgccagggtcactttggtaatgacgtcggcgttttcacacaggaaatcgaccagcgcggcatcaggcttacgcacaaaattcggattatggatgcctttttttaccagattcagccacggaccttccagatgcagacctaacgcctgattcggatgttttgccaggtactcgcgcataacgcgcacgccctgtttcatcagctcatcgctggtggtgataagcgtcggcagatagttagtacagccacttttctcattggctttctgcatgatttccagcgtttccacgctgaccgcttcagcggtgtcgttaaactgtacgccgccgcagccgtttaactgcacatcgataaaaccgggggagagaatggccccgttcagactacgttgttcgatctctggcggcagttccgctaccggacagacgcttttaatcaggccatcagcgataacaaccgcgtggtcatcaagaaattcgtggccggtaaagatccggccctgggttaatgcatacattctgacccccgattttaaaaaatattgccctgagcaaggagccagggcagggataacaattacagacctttgatattttctgcttctaattcattgaaatatcttaaagtcttaactttcagctccatggtggaaggttcatcgcacaccatgatcgctttcggatgcagttgcagacagctgatggtccacatatggttcacgcaaccttcaacggcggcctgcagcgccagtgctttctggctacccagcaccagaatcatcacttcttcggcatccagcagtgtaccaacaccgacagtcagggcatattttggcacctgattaacatcgttatcaaagaaacgagagtttgcgacgcgagtgtcatgagtcagggttttgatacgagtacgagaagccagagaagacgccggttcgttaaatgcaatatgaccgtcgttacctacaccgcccataaacagatgaatttttccgtaagaacggattttttcttcatactggcggcactcggcgtcgatatccggggcgttgccgttgagaaggttgatgttttctgctggaatatcaacgtgatcgaagaaattacggtgcataaagctgtagtagctttccggatgctctttcggcagaccgacatattcgtccatgttgaaggtgacaacgtgcttaaagctgacctggcctgctttatgcatttcgactaacgctttataggtggtcatcggcgtgccgccagtcggcaggcccagtacaaacggacgatcggcagtcggtttgaacgcattgatacgattgacgatatggcgagcagcccatttgccgacctgttcagcggtagtcagggggatcagtctcattattcacctcaataagtaaaatgtaagccgttggcggattaggcatctttaagcgtaacctggatttgcgcagacaggcgtcaatccgacctgattttttgaatgataaaataagttttctggtttagccagtaaaagggagtgataataacgatatttggtgacaaaactcacaaaagacacgcgtttaatttgcgatacgaattaaattttcacacactctgtagcagatgatctaacaatctgattacagaacatcggcagtacaatttgcagcaaaataaaaatacggcttgaaacgagccaaatagggttctcgtagggggaataagatgaatattttaggttttttccagcgactcggtagggcgttacagctccctatcgcggtgctgccggtggcggcactgttgctgcgattcggtcagccagatttacttaacgttgcgtttattgcccaggcgggcggtgcgatttttgataacctcgcattaatcttcgccatcggtgtggcatccagctggagcaaagacagcgctggtgcggcggcgctggcgggtgcggtaggttactttgtgttaaccaaagcgatggtgaccatcaacccagaaattaacatgggtgtactggcgggtatcattaccggtctggttggtggcgcagcctataaccgttggtccgatattaaactgccggacttcctgagcttcttcggcggcaaacgctttgtgccgattgccaccggattcttctgcctggtgctggcggccatttttggttacgtctggccgccggtacagcacgctatccatgcaggcggcgagtggatcgtttctgcgggcgcgctgggttccggtatctttggtttcatcaaccgtctgctgatcccaaccggtctgcatcaggtactgaacaccatcgcctggttccagattggtgaattcaccaacgcggcgggtacggttttccacggtgacattaaccgcttctatgccggtgacggcaccgcggggatgttcatgtccggcttcttcccgatcatgatgttcggtctgccgggtgcggcgctggcgatgtacttcgcagcaccgaaagagcgtcgtccgatggttggcggtatgctgctttctgttgctgttactgcgttcctgaccggtgtgactgagccgctggaattcctgttcatgttccttgctccgctgctgtacctcctgcacgcactgctgaccggtatcagcctgtttgtggcaacgctgctgggtatccacgcgggcttctctttctctgcgggggctatcgactacgcgttgatgtataacctgccggccgccagccagaacgtctggatgctgctggtgatgggcgttatcttcttcgctatctacttcgtggtgttcagtttggttatccgcatgttcaacctgaaaacgccgggtcgtgaagataaagaagacgagatcgttactgaagaagccaacagcaacactgaagaaggtctgactcaactggcaaccaactatattgctgcggttggcggcactgacaacctgaaagcgattgacgcctgtatcacccgtctgcgccttacagtggctgactctgcccgcgttaacgatacgatgtgtaaacgtctgggtgcttctggggtagtgaaactgaacaaacagactattcaggtgattgttggcgcgaaagcagaatccatcggcgatgcgatgaagaaagtcgttgcccgtggtccggtagccgctgcgagtgctgaagcaactccggcaactgccgcgcctgtagcaaaaccgcaggctgtaccaaacgcggtatctatcgcggagctggtaagcccgattaccggtgatgtcgtggcactggatcaggttcctgacgaagcattcgccagcaaagcggtgggtgacggtgtggcggtgaaaccgacagataaaatcgtcgtaagtccagccgcagggacaatcgtgaaaatcttcaacaccaaccacgcgttctgcctggaaaccgaaaaaggcgcggagatcgtcgtccatatgggtatcgacaccgtagcgctggaaggtaaaggctttaaacgtctggtggaagagggtgcgcaggtaagcgcagggcaaccgattctggaaatggatctggattacctgaacgctaacgcccgcagcatgattagcccggtggtttgcagcaatatcgacgatttcagtggcttgatcattaaagctcagggccatattgtggcgggtcaaacaccgctgtatgaaatcaaaaagtaatctgctttatgcctgatgcgacgcttgagcgtcgcatccaacaatgacaagcggtggagatcttctctgccgctttttttttcatcaatcatccccataatccttgttagattatcaattttaaaaaactaacagttgtcagcctgtcccgcttataagatcatacgccgttatacgttgtttacgctttgaggaatccacgatgagtgaggcagaagcccgcccgactaactttatccgtcagatcatcgatgaagatctggccagtggtaagcacaccacagtacacacccgtttcccgccggagccgaatggctatctgcatattggccatgcgaaatctatctgcctgaacttcgggatcgcccaggactataaaggccagtgcaacctgcgtttcgacgacactaacccggtaaaagaagatatcgagtatgttgagagcatcaaaaacgacgtagagtggttaggttttcactggtctggtaacgtccgttactcctccgattattttgatcagctccacgcctatgcgatcgaactgatcaataaaggcctggcgtacgttgatgaactgacgccggaacagatccgcgaataccgcggcaccctgacgcaaccgggtaaaaacagcccgtaccgcgaccgcagcgttgaagagaacctggcgctgttcgaaaaaatgcgtgccggtggttttgaagaaggtaaagcctgcctgcgtgcgaaaatcgacatggctagtccgtttatcgtgatgcgcgatccggtgctgtaccgtattaaatttgctgaacaccaccagactggcaacaagtggtgcatctacccgatgtacgacttcacccactgcatcagcgatgccctggaaggtattacgcactctctgtgtacgcttgagttccaggacaaccgtcgtctgtacgactgggtactggacaacatcacgattcctgttcacccgcgccagtatgagttcagccgcctgaatctggaatacaccgtgatgtccaagcgtaagttgaacctgctggtgaccgacaagcacgttgaaggctgggatgacccgcgtatgccgaccatttccggtctgcgtcgtcgtggttacactgcggcttctattcgtgagttctgcaaacgcatcggcgtgaccaagcaggacaacaccattgagatggcgagcctggaatcctgcatccgtgaagatctcaacgaaaatgcgccgcgcgcaatggcggttatcgatccggtgaaactggttatcgaaaactatcagggcgaaggcgaaatggttaccatgccgaaccatccgaacaaaccggaaatgggcagccgtcaggtgccgtttagcggtgagatttggattgatcgcgccgatttccgcgaagaagctaacaagcagtacaaacgtctggtgctgggtaaagaagtgcgtctgcgtaatgcttatgtgattaaggcagaacgcgtcgagaaagatgccgaaggtaatatcaccaccatcttctgtacttatgacgccgataccttaagcaaagatccggcagatggtcgtaaagtcaaaggtgttattcactgggtgagcgcggcacatgcgctgccggttgaaatccgtttgtatgaccgtctgttcagcgtgcctaacccaggtgctgcggatgatttcctgagcgtgattaacccggaaagcctggtgatcaaacagggctttgctgaaccgagcctgaaagatgcggttgcgggtaaagcattccagtttgagcgtgaaggttacttctgcctcgatagccgccattctacggcggaaaaaccggtatttaaccgcaccgttgggctgcgtgatacctgggcgaaagtaggcgagtaattttaagtttcgctatgccggatggggcgtttacgtcgcatccggcaaggaacagacaaacagtttcaaacgctaaattgcctgatgcgctacgcttatcaggcctacatgatctctgcaatatattgagtttgcgtgcttttgtaggccggataaggcgttcacgccgcatccggcaagaaacagcaaacaatccaaaacgccgcgttcagcggcgttttttctgcttttcttcgcgaattaattccgcttcgcaatttatccataaaataaatttaaaataacaaaacataattaaataaaatgtaaccgctttcatcttgctggaatttcacgcttttattcttctgcaagcctttcaaccgcaaacttaagccttgtaacaaaaatcatcaaaatatgtgcggttgctcatgttcttacattctggttacagaaagagattgataattcgcgtcgcgaaaaatagtctgttcctgtagtcagcgagacttttctcaacgctacttttttaatttttattttttcgctgttcacctttggtgcagcaatttatacgtcaaagaggattaacccatgcgtacgtttagtggcaaacgtagtacgctggcgctggctatcgccggtgttacagcaatgagcggctttatggcaatgccggaggctcgcgccgaaggattcatcgacgatagtaccttaaccggcggtatctattactggcagcgtgaacgcgaccgtaaagatgttaccgacggcgacaaatacaaaaccaacctttctcactccacctggaatgccaacctcgattttcagtccggttatgctgctgatatgttcggccttgatattgctgcgtttacggcgattgaaatggcggaaaacggcgacagctcccacccgaacgaaatcgcgtttagtaaaagtaataaagcctatgacgaagactggtccggcgacaaaagcggtataagcctgtataaagctgcggccaaatttaaatacggtccggtttgggcgagggcaggttacattcagccaactggtcaaacgctgttagcgccgcactggagctttatgccaggtacttatcagggggcggaagccggggcgaattttgattacggcgatgctggtgcgttgagtttctcctacatgtggaccaacgaatacaaagcgccgtggcatctggaaatggatgagttttatcagaacgataaaaccaccaaagttgattatctgcactcctttggggcgaaatacgacttcaaaaataacttcgtactggaagcggcatttggtcaggcggaagggtatatcgatcaatattttgccaaagccagctacaaatttgatatcgccggtagcccgttaaccaccagctaccagttctacggtacccgagataaagttgacgatcgcagcgtcaacgacctttatgacggcaccgcctggctgcaagcgttgacctttggttaccgggcggctgacgtagtggatttgcgcctcgaaggcacctgggttaaggctgacggtcagcagggatacttcctgcaacgtatgactccaacctacgcttccagtaacggtcgcctggatatctggtgggataaccgttctgacttcaacgccaacggcgaaaaagcggtcttcttcggtgcgatgtatgacctgaaaaactggaatcttccaggcttcgccatcggcgcttcctacgtttacgcatgggatgctaaacctgcgacctggcagagcaatccggatgcgtactacgacaaaaaccggactattgaagagtctgcctacagcctggatgcggtctataccattcaggacggtcgcgccaaaggcacgatgttcaaactgcatttcaccgaatacgacaaccactccgacatcccaagctggggcggtggttacggcaacatcttccaggatgagcgtgacgtgaaatttatggtaatcgcaccattcaccatcttctgatgcccgacgcggcaggttttgtgcctgccgcacgtttgaggaatttgctatgaaaaaactgattctcatcgccataatggcaagcgggctggtagcttgtgcgcaaagtaccgcgccacaggaagacagtcgtctgaaagaggcatacagcgcctgtatcaacaccgcacaaggtagcccagaaaaaattgaagcctgccagagcgtgttaaacgtgctgaagaaagagaaacaacatcagcagtttgccgaccaggaaagtgtacgcgtactggattatcagcagtgtctgcgtgcaacgcaaaccggaaatgatcaggcggtgaaagccgattgtgataaagtctggcaggaaatacgcagtaataacaaataagtgagagctgtaactctcgcttttcttatttcccttgcataaaaaagccaacccgcaggttggcttttctcgttcaggctggcttatttgccttcgtgcgcatgttcatcttcgcggcaatcgccttcggcacagtgaccgtaaagatagagactgtggttagtcaggcgaatgccatgttttgcggcaatttcacgctgacgcgcttcgatggaatcatcactaaattcgataaccttgccgcagtcgaggcagatcaggtgatcgtggtgatgttgctgtgtcagttcaaatacggatttaccgccttcaaaattgtggcgggtgacgataccagcgtcgtcaaactggttcagtacgcgatataccgtagccagaccaatttcttcacccatatcgatcagacgtttgtataaatcttccgcactgacgtgatggttgtccggctcctgaagaacttccaggatttttaaacgaggaagcgttactttcaggccagctttctttagggcggtattgttatcagtcatgcggaatctgtcctgttactaagcggttcacttcattagaagaagtgacagaatttgctcttgagataatgcgtatcattatagaattgccacgcctaaatgaaaaccacaagtccctggcaaatattgttaataaaaacgtggcacagcttacatttacaacggcaaggccacttgaacaccgggacattgtacaggtacaacagcaaaagttacaaatttgtagcaattattttgattggcattatctattaatacggcgtagacatgagtctacgccgcatcacatcaggcattgagaatttcgtcgagatgcaactcttcagaaatctgtttaacccatttttctacacgttcagcggtcagttccggctgacggtcttcgtcgatagccagaccgacaaagtggtcgtcatctgccagacctttacttgcttcgaaatgatagcccgcagttggccagtgaccaacgatggttgcaccgcgcggttcaatgatgtcgcggatggtgcccaatgcgtcgcagaaatattcggcgtaatcttcctggtcaccacaaccaaacagcgcaaccagtttgccgttgaaatcaatctcttcgagagtcgggaagaagtcatcccagtcacactgcgcttcgccgtaataccaggttgggatgcccagcagcagaatgtcataagcttccagatcttctttgctgctttttgcaatgtcatggacatcggcaacgtctttaccaagctgtttttgaatcatttttgcgatattttcggtattaccggtgtcgctgccgaaaaagatgccagtgatagccatgagtgaaataacctcttgaaacttattgaaatgggggtggaaaattgcccacggataaaggcaatcatagcagaacaggcagtcttgcggaatcagcaaacgagcaggactgcacactgtgctacatgaaagtggaaatttaaacgatgccctgactacgcagcgccgccagttgctgcattaacatctcttcgatcagttcgctacggctcatattgcggctctccgccagctcgttcagcgcctcgacagcttccgcgttcagcttcagttcgacacgcttaaggccacgtactttgtcgcgttttagctggttgcgtttattaatacgcagctgttcatcgcggctaagcggattagttttcggtcgtcccggtcgacgctcgtgcgcgaacagatctaatgtcgtacggtccgtttgttctttggccatgatcttggtgacttcgggggaaacaatcagccaggcctctgcccggatggatagcgcgccataatacatcagcgcgatgagtcacgccaacgcccacgcgcggaaagcgacgcggacgctgggtttttaatcagttgcgttaatcattgagatagcgacggatagcgcgtaataccgcatccggtttttcagcatggacccagtgacccgcgcctgcaatcacatgcgcccgtgcctgtggaaattgagccagtaaatcatcacggtactgctcgctaacatacggagaattgccgccagggataaacagggcagggtgatcccatgccgggattttctcccaacctacaatatgcggatactgatcccacaataccggcacgttaaagcgccactccccgtcaacaaaagatttcagcagaaactgaatcaccccttcttcattaagatgctggcgcattattgctgctgcttgctggcgagtttgtgcgtcgctttcactgaccgcgttgatagccgcaaaaatctcatcatgacggcgtacgtgatagtcgaccggcgcgatatcgatcgccaccagtttatcgatgcgatcggaggctagtgcagtaagtgccattaccgctttaccgcccatggagtgaccgataaatgttgctttgtcgatctgctgtgcatccagagtatcaacaagatcctgcgccatcgccgggtaattcattaccggatctctcggactaagaccgtggttacgcatatcaacctggatgatattgtgatcgtttaccagatcgcgagccagtacgccaaggttgtcgaggctgccaaacagaccgtggacaagaacgatgggagaattattgtgctggttttgtgcagtttgcgcgcggatattcaatttcatggcaaagttctttttttcgcgttgtcgggttagggtattatgttgaccattgtgccacagggctgcaacaaataaggtttattccgagtttttctgcaagccaggcttgacgctatccgctgccgggatttattcatatactcctggcgacttgtattcagctaagacactgcactggattaagatgaaaacgattgaagttgatgatgaactctacagctatattgccagccacactaagcatatcggcgagagcgcatccgacattttacggcgtatgttgaaattttccgccgcaagtcagcctgctgctccggtgacgaaagaggttcgcgttgcgagtcctgctatcgtcgaagcgaagccggtcaaaacgattaaagacaaggttcgcgcaatgcgtgaacttctgcttagcgatgaatacgcagagcaaaagcgagcggtcaatcgctttatgctgctgttgtctacactatattctcttgacgcccaggcgtttgccgaagcaacggaaagcttgcacggtcgtacacgcgtttactttgcggcagatgaacaaacgctgctgaaaaatggtaatcagaccaagccgaaacatgtgccaggcacgccgtattgggtgatcaccaacaccaacaccggccgtaaatgcagcatgatcgaacacatcatgcagagcatgcaattcccggcggaattgattgagaaggtttgcggaactatctaaaacgttgcagacaaaggacaaagcaatggcaatccacaatcgtgcaggccaacctgcacaacagagtgatttgattaacgtcgcccaactgacggcgcaatattatgtactgaaaccagaagcagggaatgcggagcacgcggtgaaattcggtacttccggtcaccgtggcagtgcagcgcgccacagctttaacgagccgcacattctggcgatcgctcaggcaattgctgaagaacgtgcgaaaaacggcatcactggcccttgctatgtgggtaaagatactcacgccctgtccgaacctgcattcatttccgttctggaagtgctggcagcgaacggcgttgatgtcattgtgcaggaaaacaatggcttcaccccgacgcctgccgtttccaatgccatcctggttcacaataaaaaaggtggcccgctggcagacggtatcgtgattacaccgtcccataacccgccggaagatggtggaatcaaatacaatccgccaaatggtggcccggctgataccaacgtcactaaagtggtggaagacagggccaacgcactgctggccgatggcctgaaaggcgtgaagcgtatctccctcgacgaagcgatggcatccggtcatgtgaaagagcaggatctggtgcagccgttcgtggaaggtctggccgatatcgttgatatggccgcgattcagaaagcgggcctgacgctgggcgttgatccgctgggcggttccggtatcgaatactggaagcgtattggcgagtattacaacctcaacctgactatcgttaacgatcaggtcgatcaaaccttccgctttatgcaccttgataaagacggcgcgatccgtatggactgctcctccgagtgtgcgatggcgggcctgctggcactgcgtgataagttcgatctggcgtttgctaacgacccggattatgaccgtcacggtatcgtcactccggcaggtttgatgaatccgaaccactacctggcggtggcaatcaattacctgttccagcatcgtccgcagtggggcaaagatgttgccgtcggtaaaacgctggttagttctgcgatgatcgaccgtgtggtcaacgacttgggccgtaaactggtagaagtcccggtaggtttcaaatggtttgtcgatggtctgttcgacggcagcttcggctttggcggcgaagagagtgcaggggcttccttcctgcgtttcgacggcacgccgtggtccaccgacaaagacggcatcatcatgtgtctgctggcggcggaaatcaccgctgtcaccggtaagaacccgcaggaacactacaacgaactggcaaaacgctttggtgcgccgagctacaaccgtttgcaggcagctgcgacttccgcacaaaaagcggcgctgtctaagctgtctccggaaatggtgagcgccagcaccctggcaggtgacccgatcaccgcgcgcctgactgctgctccgggcaacggtgcttctattggcggtctgaaagtgatgactgacaacggctggttcgccgcgcgtccgagtggcacggaagacgcatataagatctactgcgaaagcttcctcggtgaagaacatcgcaagcagattgagaaagaagcggttgagattgttagcgaagttctgaaaaacgcgtaaacacatttaataaaaaaagggcggtcgcaagatcgcccttttttacgtatgacaaacacagaattgcctgatgcgctacgcttatcaggcctacgaggatggtgcaatatattgaatttaagcgattttgtaggccggataaggcgttcacgccgcatccggcaaaaacaacgaacactttgtcaacaaactgagtagctcaaggaaatcccaatgaagaccaacaggagtctggtcgtcatagtgagtctaattaccgccacattactgctgactgcatgcgcccaacctgaacaaagtagtttagctggcgactggttactgacccctaaagataaaaccagaggattaacgggtagcattgcggtaaatattgcacctttccggtgtaagacaaattgccgtggtgataacttacctgataatacccgccgctggcagttgagtggcgggaacgaaaaagaacttacttatcttcataatatgagtgcacaagaaaaggtcggtttaaatcccggttggcaatgctacaccagtttttttatgcgggtttgccagggcaagcccggcactcgaccgatagtcaatgaggattatgtcagcgaaagcggattttttggcagcatgatgcatgtcgggattattgagttacgacgctgccagagtgaaaattgccagcaagaattgaaagcgataaatacacattaaaatagtgagtccgggaatgaaacccggacctgaacatgtcttattgcgtgaatgtttctttcatttgatactgcatttcccagagttcagtaaggctaataacttttcttgttcttgcttcttcactttgtacccataagaaagggtagaacgtgaaggcttccgttgcgcttaattttattacgtcttctcgccattgctgccatcgtacattttcatagaaggtatctaaatcaccggataatgcccactgaagaaactcagaatatccaacttccagactttcccaattcagcgtatctggcgcaaaataataaacgcagccagtatcttccccaagatcgccaccattaagagcaaaaattacccctgcgacatcgtcagcgatgggtaaagcccgcacgcctgcgaattcagggcgttgtgtccaacttactggatctcgtggcaaccgggggtgaccagatcctgctatgcgtaattaaccattatcaatcagcagacctccggagccatagacaagcgcacccatcggactttttgttgtcacctgtaattgataaagtgcggtttcggctaaatctttattaaccggtaagagttcggtatggtttgtggcgtcttttaaccagttctggattattggccaggcactatcttcagtatttactaactgattcatttcacgcatcgctacttgctccttgtgtgctacggtgtcatttatgatgaggaattgtatggaacattttttaaatattaagttccttatatttgaataaaaaatgactttatccatacattgccacttttttcaaagcataaaccgatacccaataccggtttcagtaataaaatggcgaggccgggccggatcctgttccagtttttgtcgcagatgccccatataattacgcaaatagttgctgtgttcgatcgcgtttagaccctacatctgccggatgcggcataaataacgaactatttgccaacaaacagaaagggcgatcattcaatcgcccttttttactttgttttattaaccgtgtttatttttcagttcaaagcgtggacttaccagaccatacagtgtccaaccaaggaaggtcacgatggaaccgtacagcatggcttcttccccggaactgtacagcgcataaaagctatacatcgcgccaacaaaagcaacaaagtttgcaactttcgctttactggggggcacattagcgaccttctgaataatgactaatgccgccatactcagaatatacggaatgatattggtcaccacggccaggttaaccagcacgttgaactgactgtttaggctcgggctaatggtcatcagtgccaatccactctgaataatcacaatggtcaacattccctgcaccggtgcatccactttggttacacgggagaaaattttagggaagtagccttcatcagaactagatttaaacacctgggcaatggtgaactgccagccaagtaggctaccgcagcaggacatcaccatcagcgccataatgactttacccacttccggcgtgaacatctgcgcgaaggccagaccaaatggtgccgtactatttgccagctccatatttggcacaatcccggcaatcacgttggtggagacgatataaatcaccgccgcacctaacgtaccgccgagtaccgcgattggcacattacgttccgggttttccactacatcagtattcgcacacgcagactccagaccaagaaaagcccacagcgtcatagcgatggaagaacctaccgcactgaagaacggtgcatgatgcggattccaggaatcaacgtacagcgtcgggctaaaccagaaccagccaataatgcacagaccgacgaccggaataatgaccccccacacggtaatgctactgatttgcccggtaatgcgcgcaccaccaaagttagccacggtacaaatccacagcaccccgatggtcgcaagaccaatctgcactgggctcaaactcgcgccgagcagttcggtgccgtaaccaaccgcgctaatagcaatcgcgacgttagcaatcagcagactgacgccgtaggtatagttcgccataaagttaccggatttaccgaaagcatactcggcataaccgcccataccgccacttttacggctgaacataccgcattttgcgaatgcccatgccagtgccatactgcctacggctgtcaccagccaggagataatactgattgtcccgacttcggcaagctttgtcggcagcatgatgataccggagcccatcatgttgaccatcgtcagtatggttaactgaacgacgcccattttgttgcttttagcctgactcataatttttcccctttcaacagggtgctttgcgcatcacgaggcttgatgacatagcaccaaacttgcttacgaccatcatgttcttcgatatagacaccctgcagctccggtgcaaaacctggcagcaggttgatcccttcttccagagcgctgaagtaacgcagaacagcaccaccccagatttcacccggaacaacacacagcacacccggaggataaggaagcgcaccttcggcagcgatacggccttctgcatccggcagacgaaccagttccacttcaccgcgtaaataggcgtagttggcttcttgcggattcatgctgacgcgtgggaagtgctccttacggaacatctctttttgcagttgtttcacgttgtggcgggcatacaaatcatgcatttcctgacacaactgacgcagggtataaccggcgtagcgctcttcatgctgtttgtagatggaaggtagcacttctgctaatggcgcgtcggactcaagcagtttttcgaagcgtaccagcagggcaacaagttgctgaagtttggccatatcttctgccggagtcagcaggaagaggatggagttaagatcgcatttttccggcactacgccattttcgcgcaggaagttagcaagaatcgtcgcgggtacaccgaacgcttcatattcgccgttacgtgcatcaatacctggggttgtcagcaacagtttgcatggatcgacaaagtattgattctctgcatagccttcaaaagaatgccagtgttcccctggtacaaactggaagaagcgcagatcaaccgcaatttgcgctgtttcatagctctgccagggtttaccatccaccagttcaggtacgaacggacgaatatgctgacagttatcgaggatcagtttgcgggcattaatgccatttaccacacaatccatccacatattacgaccgctgacaccttcatgcattttggcgttgatattcagtgcggcaaacagcggatagaacgggctggtggaggcgtgcatcataaaggcgttgttcatgcgtttgtgcggtacataacgctgttgccctttgatgtggctgtcttttttatgaatttgactagtctgagaaaaaccagcctgttgtttatgcacagattgcgtaaccagaatacccggatcgttctcattaagatccagcaacagcgggctacagtccgccatcatcggaataaactgttcatagccgacccatgcactgtcaaacaggatgtagtcacacagatgaccaattttatccaccacttggcgggcgttataaatcgtaccgtcgtaggtgcctaactgaatcacagcgaggcggaaaggacgagcctcttttgcccgctgcggtgcgacttccgcgatcagctcacgcaggtaactttcttcaaaacagtgcgcatcaatgccaccgataaagccatacgggttacgtgccgtttccagataaaccggtgttgcaccagcctgtagcaacgctccgtggtggttagatttgtggttattgcgatcaaacagcaccagatcacccggtgttagcagggcgtttaaaaccactttgttagaagaactagtgccatttaaaacgaagtaggttttatcggcattaaacacttttgccgcatgttgctgtgcaatgcatggcgcgccttcgtgaatcagcagatcgcccatcgctacgtcggcgttgcacaagtcggcacggaacagcgcctcaccaaagtattccacaaactgattccccgccggatggcgacggaaaaattcgccgccctgatgaccagggcaatcaaacgcgctgttaccttgattgacataatcgaccagtgcgcggaagaaaggtgggcgcagttgagtttcataatggctggcagcggtttctaactggcgaccataaaattctcgtcggctttcgcaattctcaaagacaccgctaatacggggcaaatactctgcgggtacacgttcttgattttcagtagcaataaataccgggatgccataacccgtggcatcgatttcatcgagttttccgcatgtaacatcgttgaggcttaaaactattgccgccacatcgatattacgactttcattaatgtagatacattctcgctgcgtggtaaaacagtccgggcaagaatcactaaccgcaatttttaatttactcatttttcatctctttattttaggtaatagcaggtcctcaatttctcgaatgagaaatcgatcgtgccggaaaaaagcaaagttaccccgctgataaataaatcaggtagattgcttttttcagaatgcagaaacccttaccagtcaggtggctgataatacaagggttaacagagaatgagcactgcggaatacaggcatatgcctgtaatacagagagtcaggaagacctgtacgctgaagtgcccttagtcggtagactaacgggcattgaagaagtgaaagtcgaagctattgcgatgagcaaacttcataatatgagttgtccgccttatatggggcatagtgcggctgttattttccatttaatttacctttcctgatgtgaatgaaggtgaagatattctatccaggaaatacggttgaactgtgaaggtgatcaataaaaaatgatcaatcttaatttatttaatgatgagctttttactcagtaatataaaatattgaattgttatttttgtgtgttgtttaagataaaaagccgtatttattattacggctttaattaataaaaggcaggctgtattaaaattaatattcaaagcataaaccgatagccaataccggtttcagtaatgaaatggcgtgggcgggcgggatcctgttccagtttttgtcgcagatgtcccatataaatacgcaaatagtgactgtgttcgaccgcgtttggcccccacacctggttaaggagctggcgctgggtgagtacttttccggcattgttgagcagcaccgccagcaggcggaactcaattggtgtgagatgcacctcttcctcaccccggtgaatcacgcgggcggctaaatcgacggtaacatcggaaaattttaccagcggatcgggcgcggtggtggcagagtggcggcgtaatgcgacgcgcagacgggcctgcaattcgccaatgccaaacggcttactcagataatcatccgctccggcatccagcgcggcgattttgtcgctctcttcgctgcgtgcggaaagcacaatcaccggcaccgcgctccactggcgcaggtcgcggataaactcaatcccatcaccatcgggcaggccgagatcgagaataatcaaatctggcttacgggttgccgcttccagcaagccgcgttgcagcgtttcggcctcaaagacgcgcatcccgtcgccctccagcgccgtgcgcagaaagcgacgaatagcctgttcatcttcaacaatcagaacgtttgtcacatatcctcatgaaattcttcaagttcaggggcagtttgctggggaagtgtaacacgaaaacaggcaccaccttccggtcggttgaacgcggtaatagtgcccccgtgtacatccactatcgcccgacaaattgccagtccaagccctacccccggtactgcgctctctttattcccgcgagcaaacttatcaaatatcgtctgctcctggcctggcggaagaccggggccgttatcccagacatccagttgtagattttcgccctcaacgtgggcatcgataccaatttcggcctgcgcacccgcatatttcaccgcgttctccagcagattaatcagcacccgttcaaagagtggcccgtcaacgtggattaaggtcagcggttctggcagagaaagattgatggggctgcttaaacccggttccagcatttgcagcgcgctgccgactacttcttccagcgttaaccactctttcttcaaattaaagccgccggactgaattcgcgccatatccagtagattattcaccagtcgggtagtgttcagcacatgctgacggatctcgctggcctggcgggcgtggggacttccttcgcttgccagatcgagcgttaagatttctgcctgaccaaacagcaccgtaagcggcgtgcgtaaatcatggctaagcgccgccagcagggcgttgcggatctgttcacgttcgcttgccatccgcgcctgttcttcgctggcggttagcgtcagccgctcaagggcattggcgactaacagcgtaaacgtctccagcaggcgctgctgttccgggatcatcaactggcgcagattccccggctccaccaccaccagcccgtaggttttctcgccgctttttagcggcaaaatctggtacggtacaccgggtaacgtgtcggtgcccgcgcccgcaggcaggcctttatcaaaactccactgcgcgatggcatcgtcccacggcgtcattccttgcggatgtgttaacggctgcaatttaccgttgtcatcgggcaacaacacctgactgcgggcatgaaacgtggaggcaataaattgttcgctggtggcagcgatatcctgcggactgcggcccaccgccagagctttgctcatttcatataagtgccgtgtgcgttgctcgcggtaacgggctacccgcgcctgataacgcacgccagcagtaaggttcccgatcaccagcccgacggttaacatcaccgcgaaggtcagcagatattacacatcagagacggcgagcgtgccgcgtggggcgataaaaaagagatcgaaactcactacattaatgacggtggcaaccacactaggccagcgtccataaaatagcgccaccaccaccacgccaagcagatacagcatcaccaggttggcggcatcaaacgccatcagccactgcatggcaattaaggtgataacggcgcataacgcggcggcaaccacgcatccctgaatttgtacacgccacttgtctttaaaagagcggttatccggcgcgttgttaatcgtgcgggcgggtggttcatcaagcgcgaccagcacctgatcgagatcgggggcgatgcgcgccagtcggtcagcaaacgtttcccgacgccaccagcggcggctggccgggcgaccgagaataatcttgccgagattatgttcacgggcataacgcactaccgctttctcttccgctggatcagaaagtgttgccgtctccgcgcccagttcctgcgccagacgtaaggcgctgagaattgcccgacgttttttttccggtaagcggtgcagggcaggggtttcaacatacaccgcgtgccagacgctacccagccgactcgccagccgcgccgctgcgcggaccagtttttcgctgccggtgttatggccgatgcataaaaggatcgcgtcgcgcgtgcgccacactttctcttcgccaggatgcccccgccaggcgcgcatttgctcatcaacgcgatcggcagtacggcgcagtgccagttcgcgcagggcgatcagattacctttgcggaaaaaatgttcaatggcgcgctccgcctgcccggcaatatagactttgccttctttcagccgctggcgcagatcgtccgggggcaagtccaccagcaccacgtcgtcggcggcatcgaaaaaaggatcgggcacggtttcccgtacctgaattccggtgacgccgctgaccacatcattcagactttccagatgctgaacgttgacggtagtgaaaacatcaatgccagcttccagcagttcttcgatatcctgccagcgtttgggatgacgggaacctggcgcattactgtgcgccagttcgtccattaagatcagcgccgggcggcgggcgagggcggcatcgagatcaaactcgctgatatgccgcccacggtacgcctggcgttttaacggcagaacagccagcccttccagcatggcggcggtatcttttcgcccgtgggtttctaccacgccaaccacaatatccagcccttgcgcccgcagtcgctgggcttctgccagcatcgcccaggtcttcccgacgcctgcacaggcaccgaagaaaactttcagcttcccccgatgcggcgcggcagtttgttccagcagacgatcggggtcgggacgtaagggttcgttattcatcaagtttatccagcgccagattgagttcaacaatgttgacaaccggctggccgatatatttcaccagcggttgttggctgtattttgcgatcagttgcgtgagctgttcaacgctgagattacgcgctttcgccacgcgtgggatttgccaggccgccgcttgcggggtgatattattgtccagcccgcttgcgcttgccgtcaccagttcaaccggaacgctcgcgctggcatccgggttagcggcccgtaatgcagcaacgcgtgcggctattagtttatccagctcagggttactgaccgccagattgctcccgccagaagcctgtggattatagggcatttctgccgttgcgctcgggcgaccatgaaaatagccgttgccggtaaaattctgcccgattaatgcgctaccgcgcaccgtatcaccttcacgaatcaagctaccattggcctgccagggaaaccaccattgccccagtacggtggtcagcagcgggtaaacgccgccagtaatcaataacagaaagataaatgtacttaatgccggacgtaatccactcatggtaaacctcacaccagaccgcaaacggtcagcagtaaatcaatgactttgataccgataaacggcaccagcagcccacccagaccgtaaatccataagttacggcgcaacatggcagaagcggtaagcggtttataactcacgccttttaacgccaggggaatcaaaaagacgataatcaaggcgttgaaaatcaccgcactgaggattgcggagtcggggctatgcaggcacatgatgttcagcgcatttaactgcggatacgttgccgcgaatgccgccggaataatggcgaagtatttcgccacatcgttggcaatgctgaaggtggtcaggctgccacgggtcatcagcatctgtttgccaatgtgcaccacctcgatcaacttggtcgggttagagtcgagatcgaccatattgcccgcctctttcgccgcctgggtgccggagttcatcgccaccgcgacatctgcctgcgccagcgccggagcatcgttggtgccgtcgccggtcatcgctaccaaacgaccttccgcctgatactgacggatcaatgccagcttggcctccggtgtcgcttcggcgagaaaatcatcgacacccgcttccgcagcaatcgcggcggcagtcagacggttatcgccggtaatcatcaccgttttaatgcccattttgcgcagctgggcgaagcgctctttaataccgcctttgacgatatctttcagcgcaataacgcccagcacacgagaaccttccaccaccaccagcggcgtggctccctgacgcgcaacctgatcgactttttgatcaacatcggtagggaagtgaccaccgttagcctcaacatggcgacgaatggcatcgacagaacctttacggatcatgcggttgtcgatgttgatcccgctcatccggctttgcgcagtaaacggtacaaaggtggcatggaggctctgcacatcgcgctcgcgcaggttaaaacgctgcttggcgaggatcacaatactgcggccttccggcgtttcatcagccaggctagccagttgtgcggcgtcagccagcgttttttcatccacgccctgcgcggggataaactcgctcgcctgacggttaccgagtgtgatggtgccggttttatccagtagcagaacgtcaacgtcacctgccgcttcaactgcacgtccgctggtggcaatcacattcgcgcctagcatccggctcatcccggcgacgccgatcgcactcaacaggccgccaatagtggttgggatcagacagaccagcagcgccaccagtaccgttacgctgactgcattaccgccccacgcggaaaacggccacagcgtggcggttgccagtaaaaagacgatagtcagggcaatcagcagaatggtcagggcaatttcgttcggcgttttgcgtcgctgtgcgccttccaccatcgcgaacatccgatccagaaatgtctcgccggggttaacgctacactcaatcaccagccagtcagaaagaatacgcgtgccgccggtgacggaggcaaaatcgccgccggattcacggatcaccggtgcgctttccccggtgatggcgctttcatcgacgcttgcacccccttcaataacttcaccatcgcaggggataatatcgccagcttctaccagtacgatatcgcctttacgaagttggtcggcaggaactttgtccgccgcagcgccatatttcggctcacgcagcttgcgggcaaaggcagtttttttcacccctttcagactgttggcctgcgctttactgcggccttctgccagcgcctcggcgaaattagcgaacagtacggtgatccacagccaaccgctaatggccgcgctaaacagcgcattgccgggcatcgcaccgcttgccatcgcgatgctaatacaggtggtcagcagactgccgatccagacgataaacatcaccggattgcgccattgcgcctgcgggtttaattttttcaccgcttctttcagcgcctgaacgacaagtgttggttcgaatagcgccagttgtttacgactcatattcagtgctcactcaatatcatcaggagagatattccgccaccggaccaagcgccagggcagggataaaggtcagtgcgccaaccagcaacacggtgccgattaacaggccaacaaacagcgggccgtgcgttggcagcgtgccggagctggcggcttggctctttttactcaccaggctaccggcaattgccatcaccgggataatcaccccgaagcgaccgacaaacatgcagaacgccagtaaacagttccagaacggagagttggcgcttaatccggcaaaggcgctgccgttgttgttagcggcggaactcacggcgtacagcacttcgctaaaaccatgcgggccagggttgagcatggcgctacgtccggcgtcggtcatcatcgccaacgccgcgcccatcagcaccagcgtcggggtaaccagaattgccagtgcagtcagtttcatctcgcgtacgtcgatttttttacccagatattccggtgtacgaccaatcatcagcccggcaataaacaccgccagcaggacaaacagcatcatgccgtaaagaccagaaccgacaccgccgaacaccacttcaccaatttgcatcagccacatcggcaccatgccaccgagagcggtaaagctatcatgcatcgcaatcaccgcgccacaggaagccgccgtcgtcacgaccgcaaacaggctactgaccagcacgccgaaacggctctctttaccttccatattgatgctgctgtccgtgcccagtgccagcagatgaggattaccctgaacttctgcccacatcaccacgcctacgcagatgacaaaaatcacactcatcgcccacagcaacatgcgcccctggcggcgatcgcccatcacttcaccaaaggcaaagcacagcgccgttgggatcaagaagatcgccagcatctgcacgaagttggtcagtgcggttgggttttcaaacggatggctgctgttggcattaaagaagccaccgccgttagtaccgagcatcttgatcgcttcctgagaagctacaggccccatgggtaacagctgttgcgctccttcaacggtattcacagcctgataaggcagaaagttttgcagcgcaccttgttgaataaaaaacagtgcaatcaacaacgccacagggactagcacccataacgtgatgcgtagcagatcgacccaggcattcccgagcgtgctcatgctctggcgggtaaacgcacggatgagggcaaaaatcaccgcaatcccgctggcggcagaaagaaagttttgcaccgttaagcccgccatctggctgaaatagctcaacgtggtttcaccgctataagattgccagttggtattggtgacaaagctgacggcggtattcagcgccagatcccagctcagccctggcaactgctgtggattaagcggcagatagtgctgaccgagcaacataaaaaacagcaccgccagccccagcatgttcaggccgagaatggcacaaagatattgcttccagttcatctcacggtcagagacgccaagtgcgcgaaaaagtacgcgctcaacgcccgttgtaccgggaagaggaatgtcattaatcagccgcgccagcccgctgcctaaaggacgcgccagcaccattaacaccagtaaaaacgtggcgatcagtaagaacccttgcgcagccatcagaacgcctccgcattgatcagggcataaaccagataacccagtaataaaaacaccagcaatacgccggttatcacgcctgcactcacagtgcacctccagtggcctaaaagtgataccggaagggtagaattctggctgcaaagatttcgcaaaaatctgcgggcggggtgtaaaaaaagtataaaaatggcaaaagccatgatttaactaatgtttagtattaatttaacttttgtgtaacttaattacaggatgaatgtaaataaaccatcaataagcaaaaataagtggtcggatgagtagtaaaattacacaaaaggcggtactattttcatcagataaacaaattcatttttccggtgccattcaccgggtagatacaaaagggggagaaaagtatggaactctacagagaatatcctgcatggcttatctttttacgccgtacttatgcggttgcagcgggcgttctggcgctgcctttcatgcttttctggaaagaccgcgcccgcttttacagctacctgcatcgcgtctggagcaaaaccagcgataaaccggtgtggatggatcaggccgaaaaggcaactggtgatttttattgattgctgagttttgaatacattgaacgtctacacttactcctgtaaaccgctcaggagcagtaatgaatctacaacgatttgatgacagcaccctaatccgtatctttgcccttcatgagttacatcgactgaaagaacatggcttaacgcgcggggcgcttctcgattatcacagccgctataaactcgtctttctggcgcattctcagccggagtaccgcaaacttggcccgttcgtggctgatattcaccagtggcaaaatctggatgactattacaaccagtaccgccaacgcgtagttgttttgctttctcaccccgccaacccgcgcgatcacaccaatgttttgatgcacgttcagggttattttcgcccgcatattgattccacagaacgccagcagctggctgcgcttatcgacagttatcgccgtggcgagcaaccacttcttgcgccgctgatgcgtatcaaacactatatggcgctttatcctgacgcctggcttagtgggcagcgttatttcgaactttggccgcgtgtgattaacttgcgccatagtggagttttatgactacccatctggtctggtttcgccaggatttacgtctgcacgataatctcgcactggctgccgcctgccgcaatagctctgcacgcgtgctggcgttgtatatcgctacaccacgccagtgggcgacgcataacatgagcccgcgtcaggctgaacttatcaatgctcaactgaatgggctacaaatagcgcttgcggaaaaaggtattcctttattgttccgtgaagtggatgactttgtcgccagtgtcgaaatagttaaacaggtgtgcgcggaaaacagcgttacccacctgttttataactatcagtatgaagtgaatgagcgggcgcgggatgtggaagttgaaagagcgctgcgtaacgtggtgtgtgaaggatttgatgacagcgtgatcctgccgcctggcgcggtgatgaccggtaatcacgagatgtacaaagtctttacgccttttaagaatgcctggctgaaacggctgcgggaagggatgccggagtgcgtcgctgcgccaaaagttcgtagtagcggaagcatagagcccagcccatccattacgctgaattatcctcgtcagtctttcgatactgcgcattttccggtggaagaaaaagcggcgattgcgcaattacgccagttttgccagaacggtgccggagaatatgagcaacaacgagattttccggcagtggaaggcaccagccgtttgagcgccagcctggcaacgggcgggttaagccctcgccagtgcttgcatcgcttgttggctgaacagccgcaggcgctggacggtggggccggtagtgtctggcttaatgagctgatctggcgcgagttttaccgtcacctgataacgtatcaccccagcttgtgtaaacatcgtccatttattgcctggacggatcgtgtacagtggcagagcaatcccgcacatttacaggcctggcaggaaggcaaaacgggatacccgattgttgatgccgctatgcgtcagcttaacagcactggctggatgcataacaggctacggatgattacagccagttttctggtgaaagatttattgatcgactggcgcgaaggcgagcgatatttcatgagccagctgattgatggtgatttggcagccaataacggtggctggcagtgggccgctagtaccggaaccgatgcagcgccgtattttcgtattttcaacccgacaacccagggcgagaaatttgatcatgagggcgagtttatccgccagtggctaccggaactgcgcgatgtgccagggaaagtggtgcatgagccgtggaagtgggcgcagaaagcaggtgtgacgctggattatccgcaaccgatagtcgagcacaaagaagcgagagtacaaacgttggcagcgtatgaggcggcgcggaaggggaaataacagacgcgtcaggcaatcgagcccagatgccggatgcggcgtgaacgccttatccagcctacaaatttgtgcaaattcaataaattgcaggaaatacgtaggcctgataagacgcgtcaagcgtcgcatcaggcatcggtgctggcctattaagactccagcgccagcgcgcggtttctgaatttcagcgcctgatacagccaaatcatcagtaccagtcctacacacgccagtgcgccccaggtaatttgatcaaatacttcaatatatgcattgatggagtagttgatcgccccggaagcatcaaagctagcctggcttgtctgatcggcaatcacgcccgccagatagttcgcgatcgcgccagaaagcagcatgtagatgccggttaatacgccggtcacaccggggatttcaatgcgcgtaatttggctcatggcaaccgggtcgataaacagttccgcaaagcccatcaccgccaggcctaataccatcagtggcagagaagagtgaccatacattgcggaccagcgggcgcttaaggtcagaatgcagaatccggcgctcatcaggccaaggccaagagcaaatttcccccagatgcgcacggtacgattacccgcgacactctcttttaccacccacgccaggaacacaccgcacagcataactgcgaaggcattaatgctctggaacatcgcggtcggaacggtataaccaaacatatcgcggttaacgaagcggtcgatataaaggctaatgctgctaccgccctgttgtgcgaaggcccagaacaacatactgaagaaggtgagcgtcacaatcagccccagctccttccgctgtttctggttttctgctttgcgataaatttttgccagtacacccaggccaataatagtcgcgacaattaaggcgtatacgctccactctttccagaacagtatggtaatcagtgcaggcgttgccaccagcagaaccagcagccatccccagttcggcaggagaaagtttgtcgcacgcagtacttttttgttaacgccgcgggtatgagtgaaatgacgattgccacataagaaaatgaccagacccgcgatcatgccaaccgccgccaggccaaagcccatcgcccagctgtactcttcctgggcgtaaccacaggcgataggtgcgataatagaccccacgttacccgccgcatacatcaggctgaaaccgccatcacgacgcggatcggttggctcatacagctcgccgagcagacagcttacgttagatttaaacaggccatagccgcagacgataatcgccagggacagatagaggaaactcggatggatctcactggcacccagcaccacatgaccgatcgccatcaacaacgcccccagcatcaccgccatgcgattgccgagaactttatccgccaaaaagccaccgaggattggcgtgacatacaccaggctacagtaggcgctaaataactcgtaggcgtgagtatcgttgtattttagttgattggtgagatagagaatcagcagggcacgcatgccgtaaaagctaaaatattcccagatttgcagcgcaacgacatagtaaatagcgcgcggctgacttgcgtgtttattcataataattccacaattgacggcaacgtcacgtaatagttgcgcggcgtgcttgtgtttccttaaagttaaaactttgatacagatctgattatttatgcaatatgctgtctgattgcataaatatacattagctgaagcgtgatgatataaacaatttgcgtcttttggcgtcgggtttgtttcttaatatgtcaaaagattggctatcgacgaactggcgaggtaacgctatgttaacggtgtagctatcagaatacggaaggcgcgaagatgaaaaacaccgaactggaacaactgattaacgaaaaactgaacagcgcggcgattagtgattacgcgccgaatggtttgcaggtggaaggcaaagagacggtgcaaaaaattgttaccggtgtcaccgccagccaggctttgctcgatgaggcagtgcgtctgggcgcggatgcggtcattgtgcatcatggctacttctggaaaggagagtctccggtcattcgcggaatgaagcgtaaccgtttaaaaacgttgctggcgaatgatatcaacctgtatggctggcatttgccgcttgacgcacatcctgagctgggcaataacgcacagctggcggcgttactggggatcacggtcatgggcgaaattgagccgttggtgccgtggggcgaactgaccatgcctgtgccgggactggagctggcttcctggattgaagcgcgtctgggacgtaagccgttatggtgtggcgataccggacctgaggtggtccagcgcgtcgcctggtgcacgggcggcgggcaaagttttatcgatagcgccgcgcgttttggcgtggatgcttttattactggcgaagtttctgaacagaccattcatagtgcccgcgagcagggattgcatttttatgctgcaggtcaccatgccactgaacgtggtggtattcgcgcattgagcgagtggctgaatgaaaataccgatcttgatgtgacctttattgatattcctaatcctgcataacgaataatcagagggatcgaaagtgcaacgagcgcgttgttatctgataggtgaaacggcggtagtgctggaactggaaccgccggtgacgctggctagccagaaacggatctggcgactggcgcagcgtctggtggatatgccgaatgtggttgaagccattcccggcatgaacaatatcacggtgattttgcgtaatcctgagagcctggcgctggatgccatagagcgtttgcaacgctggtgggaggagagcgaggcgctggagccggagtctcgctttattgaaattccggtggtttacggtggtgcaggcggaccggatttggcggtggtcgcggcgcattgcgggttgagcgaaaaacaggttgttgaattgcactcctccgtggaatacgtggtctggtttttaggttttcaaccgggcttcccgtatctcgggagtttgccggaacaactacacacgccacggcgcgctgaaccgcgcttactcgttccggcaggttctgtcgggatcggcgggccgcagactggtgtttatccgctggcaacgccgggtggctggcagttgattggtcataccagtctcagcctgtttgatccggcgcgtgacgaacccatcttattacgtccgggagacagcgtgcgctttgtaccgcagaaggagggagtatgctgaagattattcgtgcgggcatgtataccactgtgcaggatggcggtcgtcacggttttcgccagagcggtatcagccactgcggcgcactggatatgcccgcgttacgcattgctaacctactggtgggtaatgacgccaatgcccccgcgctggagatcacgctcggtcagttaactgttgagttcgaaactgatgggtggtttgctctgacgggtgccggttgcgaagcgcggctggatgataatgccgtctggaccggctggcgattgccgatgaaagcaggccagcgtttaacgcttaaacgcccgcagcacgggatgcgcagttatctggcggtcgcgggtggtattgatgttccgccggtaatgggcagttgcagcaccgatctcaaagtggggattggcgggctggaaggccgtttactgaaggatggtgaccgactcccgattggcaaaagcaagcgtgattctatggaagcgcagggcgttaaacagctgctgtggggcaaccgcattcgcgccttgccggggccggaatatcatgagttcgatcgcgccagccaggatgcattctggcgtagcccctggcagcttagcagccaaagtaaccgcatgggctatcgcttacaggggcaaattttaaaacgcaccaccgatcgcgaactgttatctcacggtttgttaccgggcgtggtgcaggtgccacataacgggcagccgattgtgttgatgaacgacgcacagaccaccggtggttacccgcgtattgcctgtatcattgaggctgatatgtaccatctggcgcaaattccgctcggtcagccgattcattttgtccagtgtagtctggaagaggcactaaaagcacggcaagatcagcaacgttattttgaacaattagcgtggcggctgcacaatgaaaattgacctgaacgccgatctgggcgaaggctgcgccagcgacgcagagctattaacgctggtttcctctgccaatattgcctgtggatttcatgcaggcgatgcgcaaatcatgcaggcttgcgtgcgtgaagcaataaaaaatggtgtcgcgattggcgctcacccgagttttcccgacagggaaaattttggtcgcagcgccatgcagctgccgccagaaaccgtttacgcccagacgctgtatcaaattggcgcgctggcaacgattgcccgtgcgcaaggcggcgtaatgcgtcatgtcaaaccgcacggcatgttgtacaaccaggcggcgaaagaagcacaactggcagacgccatcgccagagcggtatacgcttgcgatccagcattgattctcgtcgggctggcgggaagcgagctgattcgtgcaggcaagcaatatggtctgacaacgcgcgaggaagtgtttgccgatcgcggttatcaggctgacggcagcctggtgccgcgaagccagagtggcgcgttgattgaaaacgaagaacaggcgctggcgcaaacgctggagatggtgcaacacggcagagtcaaaagtatcaccggcgaatgggcaacggtcgcggcgcaaacggtctgcctgcatggcgacggcgagcacgcactggcgttcgcccgccgactacgctctgcatttgccgaaaaggggattgttgtcgcagcataaccccgattaataaagaatgaaaaaaggatatcaccatgcctgaaggcccggagatccgccgtgcagcggataacctggaggcggcgatcaaaggcaaaccactaactgatgtctggtttgccttcccgcagttaaaaccttatcaaagtcaacttatcggtcaacacgttacccatgtggaaacgcgtggtaaggcgttgttaactcatttttccaacgacttaacgctctacagccataatcagctttacggcgtctggcgcgtggttgataccggcgaagagccgcagaccacgcgagtattgcgggtaaaactgcaaacggctgacaaaaccattctgctttatagcgccagcgatattgagatgttgaccccggaacaactgaccacgcatccgtttttacaacgcgttggtcccgatgtgctggatccgaatctgacgccggaggtggtgaaagaacgattattgagcccgcgctttcgtaaccgtcagtttgctggattactgctcgatcaggcgtttctggctgggcttggcaattatttgcgggtggagatcctctggcaggttgggttgactggaaatcataaagcgaaagatctcaatgcggcgcaactggatgcactcgcacacgcgttactggagattcctcgattttcctacgctacgcgggggcaggtggatgagaataagcatcatggggcgctgtttcgctttaaggtttttcatcgagatggcgaaccgtgcgaacgttgtggcagcatcattgagaaaaccacgctgagttctcgcccgttttactggtgccctggctgccagcattaagcgctccgcttcggcgcataggtactaataaaccgcgcaatggcaggccctgtcagcaaaatactgaacaggcgtagggtttgcatcgccataatgagcgccatatcggcattgctccctgcggcgatgaccgccacggtatcaagcccgccggggctggtggcgaggtaggcagtcataaaatcaatgtgcataaaccgggtcagcccccacgccatacccgcacaaatagccagcagagcaaaaatgctcagcaggatttgcggtagcgggcgtagtgcccgcagtaagatttgtttatcgaaaccaagaccaatccgccagccaattgccatatacgccatcgccagcagccattccggtagttcgatggtgatgagctgaccagactggagcactgcgcccgccagcatcgggatgagcatcgtgccggaaggaagacgcagcaggcatcccactgtaccggcaacgaccgcgagcaaaatagtaagcaggagattaatgctcactggcgggaaccagacgatatgctggttaaccgcttcagcgttatcgcccagcatcatgcgggtgaccagaacagcggcccccgcgacgaacagcactcgcagatattgcataaacgccaccaggcgaatatctgcgccgtaatcttgcgccatagcgaccattgccgccgcgccgccaggagaggagccccaggcaccggtatttccaggcaaactgctatagcgcaccaataaccaacccacaatggcgctggaaagcagcgttaccagtaaaattgcaagcacgatcggccagttgacggccagggtggtgagaatgctaccagtgaggttttgcgcaatcatgcagccaagaatggcctgggcggcgagaaaagcagagcggggaagttgcagagtaattccgcgcatactaaagatgatcccggcgatcatcggcccaagtaatagcgccgccgggagatgtaccgcgaggaaaccaatagaaaggagaagacttagcacacataacattccccactgcaaaactggcatccttcgctccctcattattttctctttggtgtatcgatacagcataaagaaagctgggccaggaaaaaataacagcaatcaaggaaaaggggaaaatcagcaattttctgaaagagatgccctttccggcggcaaagggcatcatggtaaatcagttatagttaatcttaaaaagcaccactgtatcgaaggggccagcctcgatgggggtgcctggaatggagctaagttcagccgtataggttttttcgtagaccaacatgtcactggtgaaatcggcgtattcagcatatttattgaaggtataagggctggcgttttcatccagtaaacgtagcttcagaccattaccaatcaacaatgctttatcttcttcaaccaacgtttcttcggtataaaaggaggaactgactttaaatccgtcggtgcattgatcgttttggctcttggtcgttttaatactgaacgttttgctcattgtgtggcgacgtatatccagcaaattaaatttaccaaaatcaatcacctgtgtttccggactaatggaaaaattgacgctgcaatccagcacgcgaatgttttccagaccagtaatatgatatttcaggttttgggcagtagggtcttcgttaacgctaccggcaccgtcaaattgcacgacgatatagtcgctaagcgtactttgataatcatgcggcggcatttctcgtattttgacgtataaccgcatgcgagcgagaaaggtacggctcatatgaatattagcgggatcgccgctgcaaattttgttctgccatcccatcgcgatgatctgctcaggggtataaatatcaatgttcttactgtcgatacactggttagtgtcgatgcgactttttcccagactggcatcgtaatcgacaccgttgtatgtcacgccgagttgataataacgatcctgcacccccggataggggtttacccaggcgtagacatgctcgctttcaaagttgccgttggtattgttgtcacaatagacgggaattttaatatcgtcagattcccagatcttatcaccgggtttggcattgcctggtacagcaaacggttgaatcgcttcacttttttctactgcgccaccagatgtaccaaaatagcagttcagcgccattgcagacttcaacggcagaaataacaggcagatgacgagcaacaatcccttgccagcactcatttcgcctccactgcttgtaaacggcattgtccgctgcagttgagcgtcgtcatgcgtaatgcgccgtaatcatccatgtaaccgagataaaactggctgccgctataacttccggtgtttgtgttgaccgtactaaaaggtgcaaccatcacggttttgaagcctgggagaacgcctttttcatttctccccagataggcaatggtcagataatacgcggtaggatttttcagtgtcagttggttgccctgctggctgacctgtaactgcagttcgaccttttctcctgctttcttgcgtaatgcagccggtcgccagaacaatttaatacgactttgaatagcgacctgaagtatcgcatggtcgctgcttttatccggagcgggaggaatttcgcgcatattgtagaaaaatagcgtttcgcgatcgccaggtaattgtgtggtactggcttgtttcacaacccgcacctggcttgtcgctttcggttccagacgttgaatagggggcaaagcgaccagaagagcatcgcttttctcccctttttcattttctatccaggaataagcaagataaggcagtttgtcactttggttttcgatacgcaggctggtggctttgtcattggcgttaaacacaatgcgtgtgcgatcgggttgcaccgcagcattgcaacccaagctgatggttaacaacattaagggtaatcctttaataaatgtcattctcttttccttaattaatgacaaggtaaaatcaggcgtttggtcgtgtcttccagacgttctggcagatgaataatgcagctttgctcaccccagaccacggtaaacagttgattttcagcgacaccgcttaaccaggcatgtccttcctcgccaaccatacccacgctaatgccgctgtcatcctggcggatatccgcaccgaggggagggaactgaccgctggcgttgcgtatgatgacgttaacgtctttaccggaacgggaagccagacttttgtaacctatcgcgccttcaatccatgtttccttgatgacgttttctgcaactgttacgccgtcgggtaagtcattcatgttcaccgccacggtggaaggctggtaactggaaatcaacggcaccaccgcaatgccaaaatggttggtgtagtcgagattgccctgaaccggaatatctgccacgccatcggtgctgaccatcaggcgtggttcattggtggagctgcggcgatgaaatgctgcaccatattgggttgcggtgaaagaaccgctccagctgctgctgacggaactgtaatcactggcggcataggtaccagaaatatcccactcacccgcactactcaggtgctgatagttaccgctcacctgggctccattgtccggacgatcggattgcagtccggcagacatgccccagctattacgttcatccagcgtatcgttccagctcatgcggtgtatggtgctgtggctactgttttgcatgtcatagccaacccgaccaccgttaccgaaggggaggctaatgctcagataaatctggttgtcgcgatctttatcttcgtagtgggtcgtattgaaactcgtgctaatgctgatatctctccagtcaccaatatcaacattaaaacctgctgtgatgttggcggtcgtggaggcgtctgcattccaccaggtttgatgtagcaggttggcgtaaagattgaggtttagtggggtaatcggttggcccacggataagctgatcgtctgtttttcgtcctgcgcatcgctgtcgttgtatttgtgatccagatagttggcgtagctgtgaaaatgacgatcactgaagcgataagcggcgaggctaatcgtgctgttggtggcatccacttgtttgctgtaattaaaacggtagcttaagccccgctcgtcctgctgagtatcaaaatggctactggcccaggtgacatcaaaggacagtgcgccaagccacagcatattttgcccgatacccattgcggcagaatggtagtcatcatcagaaatcagcaggccgccgtacaggctggtgttactgagcatcccccaggaaacttcattgctaaaaaaggtttcattttcagtttgatgactcatggaaggccgtggctgacccgcggccaatttatagcgaacctgtccctggcgagtcaggaagggcgtgcttgctgcgctaacctggaaattgttcacccgaccatcttcttccgtcactttgacatccagcgtgccctgaacagactgattgaggtcatcaataataaacgggcctggcgggacttttttctggtaaatgacgcggccactttgactgatcgtcaccgtggcattggtctgtgcaataccgctaatttgtggggcgtagccacgcagctcccacggtaacattcgatcgtcactcgccagtgccgcgccggtataagaaaaaccatcgaaaatattggaactgaaatcggtttcgccgagggttaacttagagcctaattgcggtaatggacgaaaaagataggtgcggcttattccgccactctggtcatggttatcttcgctatcggtcttattaagctggtaatcactgcgtaagcgccatgccccggcgttaattccggcggtaccgtaggcattcaggttagtgctgctgctgccgtcctgtgggcggtagctgctggcaaacaagttgtaatccatcaggacaccggcaacaccttctttccatgtagaggggggagcccagttttcactgtgccacgccagccaggcttgcggaatactaatattcagttgctgattggcttgatcgaaattgaagagcatttcaggtcgggaactgaaatcaatacaccgatctatctgtggcaaggactgacggacatctggttttaaaccaaatttatcgaccagactatcattgatgcatggaatggttttgtcaccctttttttgccagttaattttttgcccattactgattttgttgttattcaccgcaacgctaacaaaatattcaccgggagcaatgactcctttttcctttaataaactaatatcaatgcggtcgcgcatacttttatcgagaacattcagattgaattcgaccgccattgcgcaaggcatcgccatgaccaggcaggatacaaaagagagtcgataaatattcacggtgtccatacctgataaatattttatgaaaggcggcgatgatgccgccaaaataatacttatttataatccagcacgtaggttgcgttagcggttacttcacctgccgtgacatcgactgcattatcaatttgttccatccaggcgaaaaagttcagcgtctgttcactactgcttgcatccaggtcaagatctggcgcggcactacctaatacgatgttaccgtcatttttgtccatcagtcgtacaccgaccccagttgcttcgcctgcactggtgttgctcaacaaaggcgtagcaccagttgtcttagccgtgctatcgaaggttacgccaactttggataccggcattccgctaccgttgtcagaagcaggcagatcacagttgatcaagcgaatgtcgacggccactttattgctatgatgctcccggtttatatgggttgtcgtgacttgtccaagatctatgtttttatcaatatcttctggatgaatttcacaaggtgcttcaataacctcccccttaaagtgaatttcgccagaaccttcatcagcagcataaacaggtgcagtgaacagcagagatacggccagtgcggccaatgttttttgtcctttaaacataacagagtcctttaaggatatagaataggggtatagctacgccagaatatcgtatttgattattgctagtttttagttttgcttaaaaatattgttagttttattaaatgcaaaactaaattattggtatcatgaatttgttgtatgatgaataaaatataggggggtatagatagacgtcattttcatagggttataaatgcgactaccatgaagtttttaattgaaagtattgggttgctgataatttgagctgttctattctttttaaatatctatataggtctgttaatggattttatttttacaattttttgtgtttaggcatataaaaatcaacccgccatatgaacggcgggttaaaatatttacaacttagcaatcaaccattaacgcttgatatcgcttttaaagtcgcgtttttcatatcctgtatacagctgacgcggacgggcaatcttcataccgtcactgtgcatttcgctccagtgggcgatccagccaacggtacgtgccattgcgaaaatgacggtgaacatggaagacggaatacccatcgctttcaggatgataccagagtagaaatcgacgttcgggtacagtttcttctcgataaagtacgggtcgttcagcgcgatgttttccagctccatagccacttccagcaggtcatccttcgtgcccagctctttcagcacttcatggcaggtttcacgcattacggtggcgcgcgggtcgtaatttttgtacacgcggtgaccgaagcccatcaggcggaaagaatcatttttgtctttcgcacgacgaacaaattccggaatgtgtttaacggagctgatttcttccagcattttcagcgccgcttcgttagcaccgccgtgcgcaggtccccacagactagcaatacctgctgcgatacaggcaaacgggttcgcaccgctagagccagcggtacgcacggtggaggtagaggcgttctgttcatggtcagcgtgcaggatcagaatacggtccatagcacgttccagaatcggattaacttcatacggttcgcacggcgtggagaacatcatattcaggaagttaccggcgtaggagagatcgttgcgcgggtaaacaaatggctgaccaatggaatacttgtaacacatcgcggccatggtcggcattttgctcagcaggcggaacgcggcaatttcacggtgacgaggattgttaacatccaggctgtcgtgatagaacgccgccagcgcgccggtaataccacacatgactgccattggatggctgtcgcgacggaaagcatggaacagacgggtaatctgctcgtggatcatggtatgacgggtcaccgtagttttaaattcgtcatactgttcctgagtcggtttttcaccattcagcaggatgtaacaaacttccaggtagttagaatcggtcgccagctgatcgatcgggaaaccgcggtgcagcaaaataccttcatcaccatcaataaaagtaattttagattcgcaggatgcggtactagtgaagcctgggtcaaaggtgaacacacctttactaccgagagtacggatatcaataacatcttgacccagcgtgcctttcagcacatccagttcaacagctgtatccccgttgagggtgagttttgcttttgtatcagccatttaaggtctccttagcgccttattgcgtaagactgccggaacttaaatttgccttcgcacatcaacctggctttacccgttttttatttggctcgccgctctgtgaaagaggggaaaacctgggtacagagctctgggcgcttgcaggtaaaggatccattgatgacgaataaatggcgaatcaagtacttagcaatccgaattattaaacttgtctaccactaataactgtcccgaatgaattggtcaatacttccacactgttacataagttaatcttaggtgaaataccgacttcataacttttacgcattatatgcttttcctggtaatgtttgtaacaactttgttgaatgattgtcaaattagatgattaaaaattaaataaatgttgttatcgtgacctggatcactgttcaggataaaacccgacaaactatatgtaggttaattgtaatgattttgtgaacagcctatactgccgccaggtctccggaacaccctgcaatcccgagccacccagcgttgtaacgtgtcgttttcgcatctggaagcagtgttttgcatgacgcgcagttatagaaaggacgctgtctgacccgcaagcagaccggaggaaggaaatcccgacgtctccaggtaacagaaagttaacctctgtgcccgtagtccccagggaataataagaacagcatgtgggcgttattcatgataagaaatgtgaaaaaacaaagacctgttaatctggacctacagaccatccggttccccatcacggcgatagcgtccattctccatcgcgtttccggtgtgatcacctttgttgcagtgggcatcctgctgtggcttctgggtaccagcctctcttcccctgaaggtttcgagcaagcttccgcgattatgggcagcttcttcgtcaaatttatcatgtggggcatccttaccgctctggcgtatcacgtcgtcgtaggtattcgccacatgatgatggattttggctatctggaagaaacattcgaagcgggtaaacgctccgccaaaatctcctttgttattactgtcgtgcttagtcttctcgcaggagtcctcgtatggtaagcaacgcctccgcattaggacgcaatggcgtacatgatttcatcctcgttcgcgctaccgctatcgtcctgacgctctacatcatttatatggtcggttttttcgctaccagtggcgagctgacatatgaagtctggatcggtttcttcgcctctgcgttcaccaaagtgttcaccctgctggcgctgttttctatcttgatccatgcctggatcggcatgtggcaggtgttgaccgactacgttaaaccgctggctttgcgcctgatgctgcaactggtgattgtcgttgcactggtggtttacgtgatttatggattcgttgtggtgtggggtgtgtgatgaaattgccagtcagagaatttgatgcagttgtgattggtgccggtggcgcaggtatgcgcgcggcgctgcaaatttcccagagcggccagacctgtgcgctgctctctaaagtcttcccgacccgttcccataccgtttctgcgcaaggcggcattaccgttgcgctgggtaatacccatgaagataactgggaatggcatatgtacgacaccgtgaaagggagcgactatatcggtgaccaggacgcgattgaatatatgtgtaaaaccgggccggaagcgattctggaactcgaacacatgggcctgccgttcagccgtctcgatgatggtcgtatctatcaacgtccgtttggcggtcagagcaaaaacttcggcggcgagcaggcggcacgcactgcggcagcagctgaccgtaccggtcacgcactgttgcacacgctttatcagcagaacctgaaaaaccacaccaccattttctccgagtggtatgcgctggatctggtgaaaaaccaggatggcgcggtggtgggttgtaccgcactgtgcatcgaaaccggtgaagtggtttatttcaaagcccgcgctaccgtgctggcgactggcggagcagggcgtatttatcagtccaccaccaacgcccacattaacaccggcgacggtgtcggcatggctatccgtgccggcgtaccggtgcaggatatggaaatgtggcagttccacccgaccggcattgccggtgcgggcgtactggtcaccgaaggttgccgtggtgaaggcggttatctgctgaacaaacatggcgaacgttttatggagcgttatgcgccgaacgccaaagacctggcgggccgtgacgtggttgcgcgttccatcatgatcgaaatccgtgaaggtcgcggctgtgatggtccgtgggggccacacgcgaaactgaaactcgatcacctgggtaaagaagttctcgaatcccgtctgccgggtatcctggagctttcccgtaccttcgctcacgtcgatccggtgaaagagccgattccggttatcccaacctgtcactacatgatgggcggtattccgaccaaagttaccggtcaggcactgactgtgaatgagaaaggcgaagatgtggttgttccgggactgtttgccgttggtgaaatcgcttgtgtaagcgtacacggcgctaaccgtctgggcggcaacagcctgctggacctggtggtctttggtcgcgcggcaggtctgcatctgcaagagtctatcgccgagcagggcgcactgcgcgatgccagcgagtctgatgttgaagcgtctctggatcgcctgaaccgctggaacaataatcgtaacggtgaagatccggtggcgatccgtaaagcgctgcaagaatgtatgcagcataacttcagcgtcttccgtgaaggtgatgcgatggcgaaagggcttgagcagttgaaagtgatccgcgagcgtctgaaaaatgcccgtctggatgacacttccagcgagttcaacacccagcgcgttgagtgcctggaactggataacctgatggaaacggcgtatgcaacggctgtttctgccaacttccgtaccgaaagccgtggcgcgcatagccgcttcgacttcccggatcgtgatgatgaaaactggctgtgccactccctgtatctgccagagagcgaatccatgacgcgccgaagcgtcaacatggaaccgaaactgcgcccggcattcccgccgaagattcgtacttactaatgcggagacaggaaaatgagactcgagtttagtatttatcgctataacccggatgttgatgatgctccgcgtatgcaggattacaccctggaagcggatgaaggtcgcgacatgatgctgctggatgcgcttatccagctaaaagagaaagatcccagcctgagcttccgccgctcctgccgtgaaggtgtgtgcggttccgacggtctgaacatgaacggcaagaatggtctggcctgtattaccccgattagcgcactcaaccagccgggcaagaagattgtgattcgcccgctgccaggtttaccggtgatccgcgatttggtggtagacatgggacaattctatgcgcaatatgagaaaattaagccttacctgttgaataatggacaaaatccgccagctcgcgagcatttacagatgccagagcagcgcgaaaaactcgacgggctgtatgaatgtattctctgcgcatgttgtagtacctcttgtccgtctttctggtggaatcccgataagtttatcggcccggcaggcttgttagcggcatatcgtttcctgattgatagccgtgataccgagactgacagccgcctcgacggtttgagtgatgcattcagcgtattccgctgtcacagcatcatgaactgcgtcagtgtatgtccgaaggggctgaacccgacgcgcgccatcggccatatcaagagcatgttgttgcaacgtaatgcgtaaaccgtaggcctgataagacgcgcaagcgtcgcatcaggcaaccagtgccggatgcggcgtgaacgccttatccggcctacaagtcattacccgtaggcctgataagcgcagcgcatcaggcgtaacaaagaaatgcaggaaatctttaaaaactgcccctgacactaagacagtttttaaaggttccttcgcgagccactacgtagacaagagctcgcaagtgaaccccggcacgcacatcactgtgcgtggtagtatccacggcgaagtaagcataaaaaagatgcttaagggatcacgatgcagaacagcgctttgaaagcctggttggactcttcttacctctctggcgcaaaccagagctggatagaacagctctatgaagacttcttaaccgatcctgacagcgttgacgctaactggcgtaacacgttccagcagttacctggtacgggagtcaaaccggatcaattccactctcaaacgcgtgaatatttccgccgcctggcgaaagacgctagtcgttactctagtacgatctccgaccctgacaccaatgtgaagcaggttaaagtcctgcagctcattaacgcataccgcttccgtggtcaccagcatgcgaatctcgatccgctgggactgtggcagcaagataaagtggccgatctggatccgtctttccacgatctgaccgaagcagacttccaggagaccttcaacgtcggtagttttgccagcggcaaagaaaccatgaaactcggcgagctgctggaagccctcaagcaaacctactgcggcccgattggtgccgagtatatgcacattaccagcaccgaagaaaaacgctggatccaacagcgtatcgagtctggtcgcgcgactttcaatagcgaagagaaaaaacgcttcttaagcgaactgaccgccgctgaaggtcttgaacgttacctcggcgcaaaattccctggcgcaaaacgcttcagcctggaaggcggtgacgcgttaatcccgatgcttaaagagatgatccgccacgctggcaacagcggcacccgcgaagtggttctcgggatggcgcaccgtggtcgtctgaacgtgctggtgaacgtgctgggtaaaaaaccgcaagacttgttcgacgagttcgccggtaaacataaagaacacctcggcacgggtgacgtgaaataccacatgggcttcagctctgacttccagaccgatggcggcctggtgcacctggcgctggcgtttaacccgtctcaccttgagattgtaagcccggtagttatcggttctgttcgtgcccgtctggacagacttgatgagccgagcagcaacaaagtgctgccaatcaccatccacggtgacgccgcagtgaccgggcagggcgtggttcaggaaaccctgaacatgagcaaagcgcgtggttatgaagttggcggtacggtacgtatcgttatcaacaaccaggttggtttcaccacctctaatccgctggatgcccgttctacgccgtactgtactgatatcggtaagatggttcaggccccgatttttcacgttaacgcggacgatccggaagccgttgcctttgtgacccgtctggcgctcgatttccgtaacacctttaaacgtgatgtcttcatcgacctggtgtgctaccgccgtcacggccacaacgaagccgacgagccgagcgcaacccagccgctgatgtatcagaaaatcaaaaaacatccgacaccgcgcaaaatctacgctgacaagctggagcaggaaaaagtggcgacgctggaagatgccaccgagatggttaacctgtaccgcgatgcgctggatgctggcgattgcgtagtggcagagtggcgtccgatgaacatgcactctttcacctggagcccgtacctcaaccacgaatgggacgaagagtacccgaacaaagttgagatgaagcgcctgcaggagctggcgaaacgcatcagcacggtgccggaagcagttgaaatgcagtctcgcgttgccaagatttatggcgatcgccaggcgatggctgccggtgagaaactgttcgactggggcggtgcggaaaacctcgcttacgccacgctggttgatgaaggcattccggttcgcctgagcggtgaagactccggtcgcggtaccttcttccaccgccacgcggtgatccacaaccagtctaacggttccacttacacgccgctgcaacatatccataacgggcagggcgcgttccgtgtctgggactccgtactgtctgaagaagcagtgctggcgtttgaatatggttatgccaccgcagaaccacgcactctgaccatctgggaagcgcagttcggtgacttcgccaacggtgcgcaggtggttatcgaccagttcatctcctctggcgaacagaaatggggccggatgtgtggtctggtgatgttgctgccgcacggttacgaagggcaggggccggagcactcctccgcgcgtctggaacgttatctgcaactttgtgctgagcaaaacatgcaggtttgcgtaccgtctaccccggcacaggtttaccacatgctgcgtcgtcaggcgctgcgcgggatgcgtcgtccgctggtcgtgatgagcccgaaatccctgctgcgtcatccgctggcggtttccagcctcgaagaactggcgaacggcaccttcctgccagccatcggtgaaatcgacgagcttgatccgaagggcgtgaagcgcgtagtgatgtgttctggtaaggtttattacgacctgctggaacagcgtcgtaagaacaatcaacacgatgtcgccattgtgcgtatcgagcaactctacccgttcccgcataaagcgatgcaggaagtgttgcagcagtttgctcacgtcaaggattttgtctggtgccaggaagagccgctcaaccagggcgcatggtactgcagccagcatcatttccgtgaagtgattccgtttggggcttctctgcgttatgcaggccgcccggcctccgcctctccggcggtagggtatatgtccgttcaccagaaacagcaacaagatctggttaatgacgcgctgaacgtcgaataaataaaggatacacaatgagtagcgtagatattctggtccctgacctgcctgaatccgtagccgatgccaccgtcgcaacctggcataaaaaacccggcgacgcagtcgtacgtgatgaagtgctggtagaaatcgaaactgacaaagtggtactggaagtaccggcaagtgcagacggcattctggatgcggttctggaagatgaaggtacaacggtaacgtctcgtcagatccttggtcgcctgcgtgaaggcaacagcgccggtaaagaaaccagcgccaaatctgaagagaaagcgtccactccggcgcaacgccagcaggcgtctctggaagagcaaaacaacgatgcgttaagcccggcgatccgtcgcctgctggctgaacacaatctcgacgccagcgccattaaaggcaccggtgtgggtggtcgtctgactcgtgaagatgtggaaaaacatctggcgaaagccccggcgaaagagtctgctccggcagcggctgctccggcggcgcaaccggctctggctgcacgtagtgaaaaacgtgtcccgatgactcgcctgcgtaagcgtgtggcagagcgtctgctggaagcgaaaaactccaccgccatgctgaccacgttcaacgaagtcaacatgaagccgattatggatctgcgtaagcagtacggtgaagcgtttgaaaaacgccacggcatccgtctgggctttatgtccttctacgtgaaagcggtggttgaagccctgaaacgttacccggaagtgaacgcttctatcgacggcgatgacgtggtttaccacaactatttcgacgtcagcatggcggtttctacgccgcgcggcctggtgacgccggttctgcgtgatgtcgataccctcggcatggcagacatcgagaagaaaatcaaagagctggcagtcaaaggccgtgacggcaagctgaccgttgaagatctgaccggtggtaacttcaccatcaccaacggtggtgtgttcggttccctgatgtctacgccgatcatcaacccgccgcagagcgcaattctgggtatgcacgctatcaaagatcgtccgatggcggtgaatggtcaggttgagatcctgccgatgatgtacctggcgctgtcctacgatcaccgtctgatcgatggtcgcgaatccgtgggcttcctggtaacgatcaaagagttgctggaagatccgacgcgtctgctgctggacgtgtaatagtttaagtttcacctgcactgtagaccggataaggcattatcgccttctccggcaattgaagcctgatgcgacgctgacgcgtcttatcaggcctacgggaccaccaatgtaggtcggataaggcgcaagcgccgcatccgacaagcgatgcctgatgtgacgtttaacgtgtcttatcaggcctacgggtgaccgacaatgcccggaagcgatacgaaatattcggtctacggtttaaaagataacgattactgaaggatggacagaacacatgaacttacatgaatatcaggcaaaacaactttttgcccgctatggcttaccagcaccggtgggttatgcctgtactactccgcgcgaagcagaagaagccgctagtaaaatcggtgccggtccgtgggtagtgaaatgtcaggttcacgctggtggccgcggtaaagcgggcggtgtgaaagttgtaaacagcaaagaagacatccgtgcttttgcagaaaactggctgggcaagcgtctggtaacgtatcaaacagatgccaatggccaaccggttaaccagattctggttgaagcagcgaccgatatcgctaaagagctgtatctcggtgccgttgttgaccgtagttcccgtcgtgtggtctttatggcctccaccgaaggcggcgtggaaatcgaaaaagtggcggaagaaactccgcacctgatccataaagttgcgcttgatccgctgactggcccgatgccgtatcagggacgcgagctggcgttcaaactgggtctggaaggtaaactggttcagcagttcaccaaaatcttcatgggcctggcgaccattttcctggagcgcgacctggcgttgatcgaaatcaacccgctggtcatcaccaaacagggcgatctgatttgcctcgacggcaaactgggcgctgacggcaacgcactgttccgccagcctgatctgcgcgaaatgcgtgaccagagccaggaagatccgcgtgaagcacaggctgcacagtgggaactgaactacgttgcgctggacggtaacatcggttgtatggttaacggcgcaggtctggcgatgggtacgatggacatcgttaaactgcacggcggcgaaccggctaacttccttgacgttggcggcggcgcaaccaaagaacgtgtaaccgaagcgttcaaaatcatcctctctgacgacaaagtgaaagccgttctggttaacatcttcggcggtatcgttcgttgcgacctgatcgctgacggtatcatcggcgcggtagcagaagtgggtgttaacgtaccggtcgtggtacgtctggaaggtaacaacgccgaactcggcgcgaagaaactggctgacagcggcctgaatattattgcagcaaaaggtctgacggatgcagctcagcaggttgttgccgcagtggaggggaaataatgtccattttaatcgataaaaacaccaaggttatctgccagggctttaccggtagccaggggactttccacagtgaacaggccattgcatacggcactaaaatggttggcggcgtaaccccaggtaaaggcggcaccacccacctcggcctgccggtgttcaacaccgtgcgtgaagccgttgctgccactggcgctaccgcttctgttatctacgtaccagcaccgttctgcaaagactccattctggaagccatcgacgcaggcatcaaactgattatcaccatcactgaaggcatcccgacgctggatatgctgaccgtgaaagtgaagctggatgaagcaggcgttcgtatgatcggcccgaactgcccaggcgttatcactccgggtgaatgcaaaatcggtatccagcctggtcacattcacaaaccgggtaaagtgggtatcgtttcccgttccggtacactgacctatgaagcggttaaacagaccacggattacggtttcggtcagagcacctgtgtcggtatcggcggtgacccgatcccgggctctaactttatcgacattctcgaaatgttcgaaaaagatccgcagaccgaagcgatcgtgatgatcggtgagatcggcggtagcgctgaagaagaagcagctgcgtacatcaaagagcacgttaccaagccagttgtgggttacatcgctggtgtgactgcgccgaaaggcaaacgtatgggccacgcgggtgccatcattgccggtgggaaagggactgcggatgagaaattcgctgctctggaagccgcaggcgtgaaaaccgttcgcagcctggcggatatcggtgaagcactgaaaactgttctgaaataaatatctgtaataagaaatagccctcgccgcttccctctacaggaatggcgaagggctgtcggtttcgacatggttggccatcgtatgatggccttttttgtgcttatcggctactttttcgctgcgctatcagggtaaatttatagtcatcggtattaaaagcgttgcggctatattcaaacacccgaccatcaactaaatatccacggcttactttttcaagaatcggctttgtctggctgatattaagcagacggctcatctcttcggttggcatcagaggaatgatttcctgttcgctacgatcgataaccattttcttcacttcttcgataaagtgatatttgctattttccatgacctgccaggtgagatccgggaacaacgcaagcggcatccaggtttcttccagcgccattggcttttgcttgcgatagcgcacgcgcttcacatgccacacacgatcctgcggggtgatttgtagctgttgctgaagaaaatcgtcagccggaatcacttcgaatatcagaacttcactgtgtgtatcgacgtgacggtcgctcagtttttcatcaaaactggttaactgaaaaatatcgtaattgacccgctcttctttgacgtaagtcccgctgccctgaatgctttcgaggatctgctgctcgactagctggcgcaaagcctgacgcaccgtaacccggctgacgccaaactctgtttgtagcgcactttcagtgggtaacgcatcgccaggtttaagctcgccacgcgcaatttgttcacgaatgcgatcggcaatctgccggtataagggcttgtgtcccatttttagtatctcattaatacgaatttaaccattatgcccgataaattcatcctgtaaataatacaaatacaatacaaataatttcaatcaagtgaaattgatcacataatggtattgttttatcgggcacactggcgcgactataaaaacgatcaagtgaggatcatgatgaatctgacgactctgacccaccgcgatgcgttgtgtctgaatgcgcgctttaccagccgtgaagaggccatccacgcgttgactcaacgtcttgctgctctggggaaaatttccagtactgagcaatttctggaagaagtgtatcgccgtgaaagccttggcccgaccgccttaggtgaagggttggctgtgccgcatggcaaaactgctgcggtaaaagaagcggcgtttgcggtcgccacactcagcgagccgcttcagtgggaaggcgttgatggcccggaagcagttgatttagtggtgctgctggcgattccccccaatgaagcgggtactacgcatatgcaactgctgacagcgctgaccacgcgccttgcggatgatgagattcgggcgcgtatacagagcgcgacgacgcctgatgagttgctcagcgcgctggatgacaagggaggcacgcaaccttctgcctctttttccaacgcgccaactatcgtctgcgtaacggcctgtccggcgggtattgctcacacctatatggctgcggaatatctggaaaaagccggacgcaaactcggcgtaaatgtttacgttgaaaaacaaggcgctaacggcattgaagggcgtttaacggcggatcaactcaatagtgcaaccgcctgtatttttgcggctgaagtcgccatcaaggagagtgagcgttttaatggcattcccgcgcttagtgtgcctgttgccgagccgattcgccatgcagaagcgttgatccaacaagcgcttaccctcaagcgtagcgatgagacgcgtaccgtacagcaagatacgcaaccggtgaaaagtgtcaaaacggagctgaaacaggcactgttgagcggaatctcttttgccgtaccgttgattgtcgcggggggcacggtgctggcggtcgcggtattactgagccaaatcttcgggctacaagatctgtttaatgaagaaaactcctggctgtggatgtaccgcaagctgggcggcgggctgctcggaattttgatggtaccggtgctcgcggcctataccgcctattctctggcagataaaccggcgttagcgccaggctttgcggctggacttgccgccaacatgatcggctccgggtttctcggcgcggtcgttggcggattgatagccggttacttgatgcgctgggtgaaaaatcacttgcgtcttagcagtaaattcaatggattcctgactttttatctctacccggtgctcggtacgttgggagcgggcagtctgatgctgtttgtggtgggggaacctgtcgcctggatcaataacagccttaccgcctggctgaacggtctgagtggaagtaacgcgctgttgctgggtgccattctcggttttatgtgttcctttgaccttggagggccagtgaataaagccgcttatgcattctgcctgggcgcaatggcgaacggcgtttacggcccgtatgccattttcgcctccgtcaaaatggttagcgcatttaccgtaaccgcttccacgatgctcgcaccgcgcctgtttaaagagtttgaaattgagaccgggaaatccacctggctgttagggctggcaggtattaccgaaggggcgatcccgatggcgattgaagatccgctgcgggttattggtagctttgtgctgggctctatggtaacgggcgctattgtcggtgcgatgaatatcggccttagcacacccggtgccggcattttcagcctctttttacttcatgataatggcgcgggcggtgttatggcggcaattggctggtttggcgcggcattggtgggggctgcaatcagcactgcaattctcctgatgtggcggcgtcacgcggttaagcatggcaactatctgactgatggcgtaatgccataaacaaaaaggaaacgacgatgaaagcagtatctcgcgttcacatcaccccgcatatgcactgggatcgagagtggtatttcaccaccgaagagagtcgtattctgctggtcaataatatggaagagatcctgtgccgactggaacaggacaacgaatacaaatattacgtactcgacgggcaaacggcgatcctcgaagattatttcgcggtgaaaccggaaaacaaagaccgtgtgaagaaacaggtagaagccggcaagttgattatcggcccctggtatacccagaccgataccacgattgtttctgcggaatccatcgtccgtaatctgatgtacggaatgcgtgactgcctcgcgtttggcgagccgatgaaaataggttatttaccagattcctttggcatgtccgggcaactgccgcatatctacaatggatttggcattacccgcaccatgttctggcgcggatgtagcgagcgccacggtactgataaaaccgagtttttgtggcaaagcagtgacggtagcgaagtgacggcgcaggtgctgccgctgggctacgccatcggtaagtacttacctgccgacgaaaacggattacgtaaacgcctcgacagttattttgacgtgctggaaaaagcgtctgtaaccaaagagattttgctgccgaatgggcatgaccagatgccattgcagcaaaatatcttcgaagtgatggataagctacgtgagatctaccctcaacgtaagtttgtgatgagccgctttgaagaggtatttgagaagatcgaagcgcagcgagataatctggcaaccctgaaaggggaatttattgatggcaaatatatgcgcgtgcatcgcaccatcggttctacgcgtatggatatcaaaattgcccacgcgcgtattgaaaataagattgttaatctgctggaaccgctggcaacactggcctggacgttgggttttgaataccaccacggcttgctggagaaaatgtggaaagagatcttaaaaaatcatgcccacgacagtatcggctgctgctgtagtgacaaagttcatcgcgaaatcgtcgcccgcttcgaactggctgaagacatggcggataatctgattcgtttctacatgcgcaaaattgccgacaacatgccgcagagcgacgccgacaaactcgtcctgtttaacctgatgccctggccgcgtgaagaagttatcaacaccactgtgcggctgcgcgccagccagtttaatttgcgggacgatcgcggtcagcctgtaccgtattttattcgccatgcccgtgagatcgatccaggcctaatcgatcggcaaatagttcattacggtaattacgatccctttatggagtttgatatacagatcaaccagattgtcccttctatgggctatcgcacgctttatatcgaagcgaatcagcctggcaacgtaattgcggcaaaaagtgacgctgaagggatactggaaaatgctttctggcaaattgcgctcaatgaggatggttctctgcaactggtagataaagacagcggtgtgcgctatgaccgggtattgcaaattgaagaaagctctgatgatggtgatgaatatgactatagtcccgcaaaagaagagtgggtaattaccgcagcgaacgcgaaaccgcaatgcgatattattcatgaagcctggcagagcagggctgttatccgctatgacatggcagtgccgctcaatttgagtgaacgcagcgcccggcaatccactggcagagtaggggtggtgttggttgtcactcttagtcataacagcaggcgtattgatgtggatatcaatcttgataaccaggctgacgatcatcgccttcgtgtcctggtccctacaccttttaacaccgacagtgttctggcagatacgcagtttggtagcctaacgcgccccgtgaacgacagtgcaatgaacaactggcagcaagaaggctggaaagaagcgccggttccggtatggaatatgctcaactatgttgccttacaggaagggcgtaacggcatggctgtctttagcgaagggttacgtgaatttgaagtcatcggtgaagagaagaaaacctttgccattacgttgctgcgtggcgtgggcttactgggcaaagaagatctgcttttaaggcctgggcggcctagcggaattaaaatgccagtcccggacagtcaactacgtggtctgctttcttgtcgcctaagtttattgagttataccggtacgccaaccgccgctggtgtagctcagcaggcgcgagcatggctgactccagtacagtgttacaacaaaatcccatgggatgtgatgaagctcaacaaagccggattcaacgtgccggaaagttatagtttgttgaaaatgcccccagtgggatgcctgataagcgcacttaagaaagctgaagaccgacaagaagtgattttacggctgtttaatccggctgaaagtgcaacctgtgatgcgactgttgctttcagtcgcgaggtgatttcttgcagtgaaacgatgatggatgaacacattaccaccgaggaaaatcaaggtagtaatctaagcgggccttttttacccggccagagtcggacgttcagttaccggcttgcctgaatagcaatcaaaccgaagccacatatgcgcggccagattgttgacaaagggcgctttgttcatgccggatacggcatgaacgctttattcggtctacaaaagcaggcaaattcaatatattgcagagatgatgtagacactggcaagcgtagcgcatcaggtaattttgcgtttatcttcactctcaagccacgtatatgtggctttatttttaacaaaataataaccctgggtgagttaattataatataattataagttaactaaatgttaatattggcggggtggatttatgcctttattagtaatcctgaaactctgcgtcgtattagccagtgaccaaaaaaagaattaaggtcaaccgtgctgtttttgcttcgtctctttttatctttaattgccaaccgaaactaatttcagccttataactcacacattttaaacataaatgtcactaaagttaccttattgaaacatgattaacataatttgtaggaattgatatttatcaatgtataagtcttggaaatgggcatcaaaaagagataaattgttctcgatcaaattggctgaaaggcggtaatttagctataaattgatcaccgtcgaaaaatgcaaatttgcttcaacaaaaacctgtttattgtaaggattttgcggcgtaatatatacgtgggatcaatttgagtttttattaacatgtttgcaacctttctttacgccgtttttgtgtgcattcacatggtatgatgaaagtgttcaaacaaatttctattggggcatgcgtgtgaccctttctaacggggttcactctcggagtcttcatgcgatgagcaaggagtcatgatgttagatatagtcgaactgagccgcttacagtttgccttgaccgcgatgtaccacttcctttttgtgccactgacgctcggtatggcgttcctgctggccattatggaaacggtctacgtcctctccggcaaacagatttataaagatatgaccaagttctggggcaagttgtttggtatcaacttcgctctgggtgtggctaccggtctgaccatggagttccagttcgggactaactggtcttactattcccactatgtaggggatatcttcggtgcgccgctggcaatcgaaggtctgatggccttcttcctcgaatccacctttgtaggtctgttcttcttcggttgggatcgtctgggtaaagttcagcatatgtgtgtcacctggctggtggcgctcggtagtaacctgtccgcactgtggattctggttgcgaacggctggatgcaaaacccaatcgcgtccgatttcaactttgaaactatgcgtatggagatggtgagcttctccgagctggtgcttaacccggttgctcaggtgaaattcgttcacactgtagcgtctggttatgtgactggcgcgatgttcatcctcggtatcagcgcatggtatatgctgaaaggtcgtgacttcgccttcgctaaacgctcctttgctatcgctgccagcttcggtatggctgctgttctgtctgttattgttctgggtgatgaatccggctacgaaatgggcgacgtgcagaaaaccaaactggctgctattgaagccgagtgggaaacgcaacctgcgcctgctgcctttactctgttcggcattcctgatcaggaagaggagacgaacaaatttgcgattcagatcccttacgcactgggcatcattgcaacgcgttccgtggataccccggttatcggcctgaaagagctgatggtgcagcatgaagaacgcattcgtaacgggatgaaggcgtactctctgctcgaacaactgcgttctggttctaccgaccaggcggttcgtgaccagttcaatagcatgaagaaagacctcggttacggtctgctgctgaaacgctatacgccaaacgtggctgatgcgactgaagcgcagattcaacaggcaaccaaagactccatcccgcgtgtagcgccgctgtactttgcgttccgtatcatggtggcgtgtggcttcctgcttctggcaatcatcgcgctctctttctggagtgtcatccgcaaccgcattggcgagaaaaaatggcttctgcgcgccgcgctgtacggtattccgctgccgtggattgctgtagaagcgggctggttcgtggctgaatatggccgccaaccgtgggctatcggtgaagtgctgccgacagctgtggcgaacagcagtctgaccgcaggcgatctcatcttcagtatggtgctgatttgcggcctgtataccctgttcctggtggcagaattgttcttaatgttcaagtttgcacgcctcggcccaagcagcctgaaaaccggtcgctatcactttgagcagtcttccacgactactcagccggcacgctaagacaggagtcgtcaaatgatcgattatgaagtattgcgttttatctggtggctgctggttggcgttctgctgattggttttgcagtcactgacggtttcgacatgggggtgggcatgctcacccgtttcctcggtcgtaacgacaccgagcgtcgaattatgattaactccattgcaccacactgggacggtaaccaggtttggctgatcaccgcgggcggcgcactctttgctgcctggccgatggtctatgccgctgcgttctccggcttctatgtggcgatgatcctcgtgctggcgtctttgttcttccgtccggtcggttttgactaccgctccaagattgaagaaacccgctggcgtaacatgtgggactggggcatcttcattggtagcttcgttccgccgctggtaattggtgtagcgttcggtaacctgttgcagggcgtaccgttcaacgttgatgaatatctgcgtctgtactacaccggtaacttcttccagttgcttaacccgttcggcctgctggcaggcgtggtgagcgtagggatgatcattactcagggcgcaacctatctgcaaatgcgtaccgtgggcgaactgcacctgcgtacccgtgcaacggctcaggtggctgcgctggtgacactggtctgtttcgcactggctggcgtatgggtgatgtacggtatcgatggttatgtcgtgaaaagcacaatggaccattacgcagcctctaacccactgaataaagaagtggttcgtgaagctggcgcatggctggttaacttcaacaacacgccaattctgtgggctattccggcactgggtgtggttctgccgctgctgaccatcctgactgcacgtatggataaagccgcgtgggcgtttgtgttctcctccctgacgctggcctgcatcatcctgacagccggtatcgcaatgttcccgtttgtgatgccgtccagcaccatgatgaacgcaagtctgacaatgtgggatgcaacttccagccagctgacgcttaacgtcatgacctgggttgcggtggttctggtaccgatcattctgctctacaccgcctggtgttactggaaaatgttcggtcgtatcaccaaagaagatattgaacgtaacacccactctctgtactaagtaaggagctaaaaatgtggtatttcgcatggattctgggaacgcttcttgcctgtagctttggggtaatcaccgcgctggcgcttgaacacgtcgaaagtggcaaagccggtcaagaagacatctgatgagtaagattatcgcgactttgtatgcggtaatggacaagcgccccctgcgggcgctttccttcgtgatggcgcttctgttagcaggatgtatgttttgggacccatctcgttttgccgcgaagaccagtgaactggaaatctggcatggtttattgctgatgtgggccgtctgtgctggtgtgattcacggcgtgggctttcgtccgcagaaggttctttggcaagggattttttgcccattgcttgccgatattgttctcattgtcgggctgattttcttcttcttttaaatcagaattctctttaaaaaattatgggccgctccaggcccataaatttttacgctcccttaacttgccctcattcccaaacctcaatcgcgcgcgtatagtagcagcgtttaaaagctctaacttttgttgcattaccgggatgtaaagtgaatacaacgctgtttcgatggccggttcgcgtctactatgaagataccgatgccggtggtgtggtgtaccacgccagttacgtcgctttttatgaaagagcacgcacagagatgctgcgtcatcatcacttcagtcagcaggcgctgatggctgaacgcgttgcctttgtggtacgtaaaatgacggtggaatattacgcacctgcgcggctcgacgatatgctcgaaatacagactgaaataacaagtatgcgtggcacctctttggttttcacgcaacgtattgtcaacgccgagaatactttgctgaatgaagcagaggttctggttgtttgcgttgacccactcaaaatgaagcctcgtgcgcttcccaagtctattgtcgcggagtttaagcagtgactgacatgaatatccttgatttgttcctgaaggctagccttctggttaaacttatcatgttgattttgattggttttagtatcgcatcttgggccattattatccagcggacccgtattcttaacgcagcggcgcgcgaagccgaagcgtttgaagataaattctggtctggaatcgaactctctcgcctctatcaagagagccaggggaaacgggataatctgactggtagcgaacaaatcttttacagcgggttcaaagagtttgtgcgcctgcatcgtgccaatagccatgcgccggaagccgtagtggaaggggcgagccgtgctatgcgtatctccatgaaccgtgaacttgaaaatctggaaacgcacattccgttcctcggtacggttggctccatcagcccgtatattggtctgtttggtacggtctgggggatcatgcacgcctttatcgccctcggggcggtaaaacaagcaacactgcaaatggttgcgcccggtatcgcagaagcgttgattgcgactgcaattggtctgtttgccgctatcccggcagttatggcctacaaccgcctcaaccagcgcgtaaacaaactggaactgaattacgacaactttatggaagagtttaccgcgattctgcaccgccaggcgtttaccgttagcgagagcaacaaggggtaagccatggccagagcgcgtggacgaggtcgtcgcgatctcaagtccgaaatcaacattgtaccgttgctggacgtactgctggtgctgttgctgatctttatggcgacagcgcccatcatcacccagagcgtggaggtcgatctgccagacgctactgaaagtcaggcggtgagcagtaacgataatccgccagtgattgttgaagtgtctggtattggtcagtacaccgtggtggttgagaaagatcgcctggagcgtttaccaccagagcaggtggtggcggaagtgtccagccgtttcaaggccaacccgaaaacggtctttctgatcggtggcgcaaaagatgtgccttacgatgaaataattaaagcactgaacttgttacatagtgcgggtgtgaaaagcgttggtttaatgacgcagcctatctaaacatctgcgtttcccttgcttgaaagagagcgggtaacaggcgaacagtttttggaaaccgagagtgagtaaggcaaccgaacaaaacgacaagctcaagcgggcgataattattagtgcagtgctgcatgtcatcttatttgcggcgctgatctggagtagcttcgatgagaatatagaagctagtgccggaggcggcggtggtagctccatcgacgctgtcttggttgatagtggtgcggtagttgagcagtacaaacgcatgcaaagccaggaaagtagcgcgaagcgttctgatgaacagcgcaagatgaaggaacagcaggctgctgaagaactgcgtgagaaacaagcggctgaacaggaacgcctgaagcaacttgagaaagagcggttagcggctcaggagcagaaaaagcaggctgaagaagccgcaaaacaggccgagttaaagcagaagcaagctgaagaggcggcagcgaaagcggcggcagatgctaaagcgaaggccgaagcagatgctaaagctgcggaagaagcagcgaagaaagcggctgcagacgcaaagaaaaaagcagaagcagaagccgccaaagccgcagccgaagcgcagaaaaaagccgaggcagccgctgcggcactgaagaagaaagcggaagcggcagaagcagctgcagctgaagcaagaaagaaagcggcaactgaagctgctgaaaaagccaaagcagaagctgagaagaaagcggctgctgaaaaggctgcagctgataagaaagcggcagcagagaaagctgcagccgacaaaaaagcagcagaaaaagcggctgctgaaaaggcagcagctgataagaaagcagcggcagaaaaagccgccgcagacaaaaaagcggcagcggcaaaagctgcagctgaaaaagccgctgcagcaaaagcggccgcagaggcagatgatattttcggtgagctaagctctggtaagaatgcaccgaaaacggggggaggggcgaaagggaacaatgctagccctgccgggagtggtaatactaaaaacaatggcgcaagtggggccgatatcaataactatgccgggcagattaaatctgctatcgaaagtaagttctatgacgcaagctcctatgcaggcaaaacctgtacgctgcgcataaaactggcacccgatggtatgttactggatatcaaacctgaaggtggcgatcccgcactttgtcaggctgcgttggcagcagctaaacttgcgaagatcccgaaaccaccaagccaggcagtatatgaagtgttcaaaaacgcgccattggacttcaaaccgtaatcgcgatgttgactgttcggacggtcaacatcaggcaccggttgccacggggttctggtagttttgtgtattttagtttgttaacattctgctaaattatcgtgggccatcggtccagataagggagatatgatgaagcaggcattacgagtagcatttggttttctcatactgtgggcaagtgttctgcatgctgaagtccgcattgtgatcgacagcggtgtagattccggtcgtcctattggtgttgttcctttccagtgggcggggcctggtgcggcacctgaagatattggcggcatcgttgctgctgacttgcgtaacagcggtaaatttaatccgttagatcgcgctcgtctgccacagcagccgggtagtgcgcaggaagtacaaccagctgcatggtccgcactgggcattgacgctgtagttgtcggtcaggtcactccgaatccggatggttcttacaatgttgcttatcaacttgttgacactggcggcgcaccgggtactgtacttgctcagaacagctacaaagtgaacaagcagtggctgcgttatgctggtcataccgccagtgatgaagtgtttgaaaaactgaccggcattaaaggtgcgttccgtactcgtattgcctacgttgttcagaccaacggcggtcagttcccgtatgaactgcgcgtatctgactatgacggttacaaccagtttgtcgttcaccgtagtccgcagccgctgatgtctccggcgtggagtccagacggttctaaactggcttatgtgaccttcgaaagcggtcgttccgcgctggttattcagacgctggcaaatggcgctgtacgtcaggtggctagtttcccgcgtcacaacggtgcacctgcattcagcccagacggcagcaaactggcattcgccttgagcaaaaccggtagtctgaacctgtacgtaatggatttggcttctggtcagatccgccaggtgactgatggtcgcagtaacaataccgaaccgacctggttcccggatagccagaacctggcatttacttctgaccaggccggtcgtccgcaggtttataaagtgaatatcaacggcggtgcgccacaacgtattacctgggaaggtagccagaaccaggatgcggatgtcagcagcgacggtaaatttatggtaatggtcagctccaatggtgggcagcagcacattgccaaacaagatctggcaacgggaggcgtacaagttctgagctccacgttcctggatgaaacgccaagtctggcacctaacggcactatggtaatctacagctcttctcaggggatgggatccgtgctgaatttggtttctacagatgggcgtttcaaagcgcgtcttccggcaactgatggacaggtcaaattccctgcctggagcccgtatctgtgataataattaattgaatagtaaaggaatcattgaaatgcaactgaacaaagtgctgaaagggctgatgattgctctgcctgttatggcaattgcggcatgttcttccaacaagaacgccagcaatgacggcagcgaaggcatgctgggtgccggcactggtatggatgcgaacggcggcaacggcaacatgtcttccgaagagcaggctcgtctgcaaatgcaacagctgcagcagaacaacatcgtttacttcgatctggacaagtacgatatccgttctgacttcgctcaaatgctggatgcacatgcaaacttcctgcgtagcaacccgtcttacaaagtcaccgtagaaggtcacgcggacgaacgtggtactccggaatacaacatctccctgggtgaacgtcgtgcgaacgccgttaagatgtacctgcagggtaaaggcgtttctgcagaccagatctccatcgtttcttacggtaaagaaaaacctgcagtactgggtcatgacgaagcggcatactccaaaaaccgtcgtgcggtactggtttactaagagaattgcatgagcagtaacttcagacatcaactattgagtctgagcttactggttggtatagcggccccctgggccgcttttgctcaggcaccaatcagtagtgtcggcagtggcagcgtcgaagaccgcgtcactcaacttgagcgtatttctaatgctcacagccagcttttaacccaactccagcaacaactttctgataatcaatccgatattgattccctgcgtggtcagattcaggaaaatcagtatcaactgaatcaggtcgtggagcggcaaaagcagatcctgttgcagatcgacagcctcagcagcggtggtgcagcggcgcaaagtaccagcggcgatcaaagcggtgcggcggcaagtacgacgccgacagctgatgctggtactgcgaatgctggcgcgccggtgaaaagcggtaatgcaaacacggattacaatgcagctattgcgctggtgcaggataaatcccgccaggatgacgcaatggtggcatttcagaatttcatcaaaaattaccctgatagtacttacctgccaaacgccaattattggctgggtcagttaaactacaacaagggtaaaaaagatgatgcggcgtactattttgctagcgtagtgaaaaactatccgaagagtccaaaggctgcagatgcgatgtttaaagtcggcgtcatcatgcaggacaaaggtgacaccgcaaaagcgaaagccgtataccagcaggttatcagtaaataccctggtactgatggcgctaaacaggcacaaaaacgtctgaacgcgatgtaatgcataacacacgaccagaagtcgcattatttctggtcgtgtcgtgcgaatcataagcagttgagtgatctacatcgaaatttttgttgcgctcaagtctgaaatcagtaatatatgccgccgttgccacgggatatcaaacaaaccgaaagcaacgaaaaagtgggtcgttagctcagttggtagagcagttgacttttaatcaattggtcgcaggttcgaatcctgcacgacccaccaatcgctaaggtggaagcggtagtaaaacgtgaaggataacgttgcatgagcaacggcccgaagggcgagacgaagtcgagtcatcctgcacgacccaccactaacatagttagttgtagtatccagcgtagtatcgggtgattagctcagctgggagagcacctcccttacaaggagggggtcggcggttcgatcccgtcatcacccaccaccgggtcgttagctcagttggtagagcagttgacttttaatcaattggtcgcaggttcgaatcctgcacgacccaccagttttaacatcgaagacagatgttaagcgtgtaggataacgttgcgtcagcaacggcccgtagggcgagcgaagcgagtcatcctgcacgacccaccactaatgacggtgggttcggtggaagtagtttgtagtatccagcgcagtatcgggtgattagctcagctgggagagcacctcccttacaaggagggggtcggcggttcgatcccgtcatcacccaccactcgggtcgttagctcagttggtagagcagttgacttttaatcaattggtcgcaggttcgaatcctgcacgacccaccagttttaacatcaaactcagatgttaagcgtgaaggataacgttgcgccagcaacggcccgtagggcgagcgaagcgagtcatcctgcacgacccaccaatcttaaagattggccccgagtaaaaatctttcaggtaacacccgtatgggtcgttagctcagttggtagagcagttgacttttaatcaattggtcgcaggttcgaatcctgcacgacccaccaatttaaaggtggttactggtagagaacgtgaaggataacgttgcgttagcaacggcccgaagggcgagacgaagtcgagtcatcctgcacgacccaccatcctgaatgattaaggcagcataatcccgcaaggggtcgttagctcagttggtagagcagttgacttttaatcaattggtcgcaggttcgaatcctgcacgacccaccaatgtaaaaaagcgccctaaaggcgcttttttgctatctgcgatactcaaagattcgaacctgcagcaggtttgagttgagcgcagcgaaacaacggagccgctcgcggcgacggcccgaagggcgagcgaagcgagtcatcctgcacgacccaccaatgtaaaaaagcgccctaaaggcgcttttttgctattcaggcatcctcaatttcactttgtaaacctgatgacatcgtcagagcttactgtgcaagcaactctatgtcggtggaattaggcgtaaaatgacgcatcctgcacattaggcgtaattcgagtgacttttccccaccattcgactatcttgtttagcatataaaacaaattacaccgataacagcgaatattacgctaatgtcggttttaacgttaagcctgtaaaacgagatggtaagatgagcgtaatgtttgatccagacacggcgatttatcctttccccccgaagccgacgccgttaagcattgatgaaaaagcgtattaccgcgagaagataaaacgtctgctaaaagaacgtaatgcggtgatggttgcccactactataccgatcccgaaattcaacaactggcagaagaaaccggtggctgtatttctgattctctggaaatggcgcgcttcggtgcaaagcatcccgcttctactttgttagtcgctggggtgagatttatgggagaaaccgccaaaattctcagtccggaaaaaacaattctgatgccgacacttcaggctgaatgtagtctggatctcgactgccctgttgaagaatttaacgcattttgcgatgcccatcccgatcgtactgtcgtcgtctacgccaacacttctgctgcggtaaaagcgcgcgcagattgggtggtaactagtagcattgccgtcgaacttattgatcatcttgatagtttgggtgaaaaaatcatctgggcacccgacaaacatctggggcgttacgtgcaaaaacagacgggtggagacattctatgctggcagggtgcctgtattgtgcatgatgaatttaagactcaggcgttaacccgcttgcaagaagaatacccggatgctgccatactggtgcatccagaaagtccacaagctattgtcgatatggcggatgcggtcggttccaccagtcaactgatcgctgctgcgaaaacattgccacatcagaggcttattgtggcaaccgatcggggtattttctacaaaatgcagcaggcggtgccagataaagagttactggaagcaccaaccgcaggtgagggtgcaacctgccgcagctgcgcgcattgtccgtggatggccatgaatggccttcaggccatcgcagaggcattagaacaggaaggaagcaatcacgaggttcatgttgatgaaaggctgcgagagagggcgctggtgccgctcaatcgtatgctggattttgcggctacactacgtggataacgaataataaggcgtaacgttacgctttgggggaaagatggatttttttagtgtgcagaatatcctggtacatataccaataggggcaggcggttatgatctcagttggatcgaagcggtaggcacgatcgccgggttgctgtgtattggccttgccagtctggagaagatcagcaactacttctttggcctgatcaacgtcaccttgtttggcattattttctttcagattcagctgtatgccagcctgctattacaggtgtttttctttgccgcgaatatttacggttggtatgcgtggagccgacaaaccagtcagaacgaggcggagttgaaaattcgctggttgccattgccgaaggcactcagctggttggcggtttgcgttgttagcattggtctgatgacggtatttatcaatccggtgtttgcatttttgacccgcgtggcagtcatgatcatgcaagcattaggattacaggttgtgatgcctgaactgcaaccggacgctttcccgttctgggatagttgcatgatggtgttatctatcgtggcaatgattctgatgacgcgtaagtatgtggaaaactggctgttgtgggtgattattaacgtgattagcgtcgttatttttgcacttcagggcgtttacgccatgtctctggagtacatcatcctgacctttattgcgctcaacggcagccggatgtggatcaacagcgcacgtgaaagaggcagtcgcgcgctgtcccattaatggtgatgatgactatggccagacaccccttcattcaggtggcagtctggcccatgacaaggttgatattccatctgaatggtggcgtgctcaatctgatagtgatccatcaggtagtgttggatctgatccaacaaggcatcgtgatcgtgtggcgggatcacctgcacatgcaacgtcatcaccggcttctcgcctaccatccatacatgtacatggtgcacattgcggacttccgggatttcccggcacatacgacgcttcagttcagcgatatccaggcttaccggtgcaccttcaagtaattcattcacgctatctttcaacagtcgccacgcgctacgcagaaccagaaggctcaccagtatgctgagaatggggtcagcaggtgtccagccagtccagataataatcaacgcggcaataatagccccaacgctacccagcaggtccccgagcacatgcagtgccgctgctcgtacgttgaggtttttctcttcgctgccgtgatgaagtaaccagaaagaaagtatatttgccagcaacccagccacggcaattgccatcatcatgccgccctcgaccggacgcggcgtgcggaagcgttctatcgcctcccagacaatcaaaatggtaattaccacgagggctatggcattcacaaacgccgcgagcgtggtcagtcttagccaaccgaaagtgtggcgaatggtgggaggacgacgactaaattgcacggcgagtagggcgaaaagcagggcggcagtatcggtcaacatatgacccgcatcggccagcaatgccagagaaccagaaagaaaaccaccaacgacttctaccagcataaacccggcagtcacgccgaaagcatacaacaagcgacgagcattattatcttctggcaggtgactggacgtgtgactgtgactgtgcgccatgacgagtcatcccttaattattctcacttaactttatgacatcatactgcttttagaagtgaaaaattaaaagggagagactccgctctcccattattggctattttgcagggttactgcgtggtaccgtcggttttggtatcgacatcattattgatgccatcaccggtttgtacctttttattgatatccggacagcgaccatctttgcacatggtgttcttgtgctcttcatctttggtcattccgtcattgttcatactagaaccatcgctatgcagcattgtgccgccagaaccggtatttaccccgttattgtcgacgttatttggcgcgacattttcacgggcgtcaggggctacctggcccgcatcagctgcggcgtttgcctggccgttattagtttgcgctccgctatcggcagccagtgcggcaccgctggcaaggcttagagtggcagtcagaaataatgtggccagttttgtcattttcataggatgctcctgttatggtcgttatgtcggataacctcttccaacagtgcatttgcaggtgaatataaggcattggtttaagatttcagccaggttatgaaacgcagcagagaatcttgaaataattaacaaacaaaggagttacagttagaaattgtaggagagatctcgtttttcgcgacaatctggcgtttttcttgctaattccaggattaatccgttcatagtgtaaaaccccgtttacacattctgacggaagatatagattggaagtattgcattcactaagataagtatggcaacactggaacagacatgaattatcagaacgacgatttacgcatcaaagaaatcaaagagttacttcctcctgtcgcattgctggaaaaattccccgctactgaaaatgccgcgaatacggttgcccatgcccgaaaagcgatccataagatcctgaaaggtaatgatgatcgcctgttggttgtgattggcccatgcagtattcatgatcctgtcgcggcaaaagagtatgccactcgcttgctggcgctgcgtgaagagctgaaagatgagctggaaatcgtaatgcgcgtctattttgaaaagccgcgtaccacggtgggctggaaagggctgattaacgatccgcatatggataatggcttccagatcaacgacggtctgcgtatagcccgtaaattgctgcttgatattaacgacagcggtctgccagcggcaggtgagtttctcgatatgatcaccccacaatatctcgctgacctgatgagctggggcgcaattggcgcacgtaccaccgaaagccaggtgcaccgcgaactggcaagtgggctttcttgtccggtcggcttcaaaaatggcaccgacggtacgattaaagtggctatcgatgccattaatgccgccggtgcgccgcactgcttcctgtccgtaacgaaatgggggcatagcgcgattgtgaataccagcggtaacggcgattgccatatcattctgcgcggcggtaaagagcctaactacagcgcgaagcacgttgctgaagtgaaagaagggctgaacaaagcaggcctgccagcacaggtgatgatcgatttcagccatgctaacagctccaaacaattcaaaaagcagatggatgtttgtgctgacgtttgccagcagattgccggtggcgaaaaggccattattggcgtgatggtggaaagccatctggtggaaggcaatcagagcctcgagagcggggagccgctggcctacggtaagagcatcaccgatgcctgcatcggctgggaagataccgatgctctgttacgtcaactggcgaatgcagtaaaagcgcgtcgcgggtaaggtttaattgtcggatgcgccgtcagagtggcgtatccgatgaatcaccacaggcctgataagtcgcgcagcgtcgcatcaggcaatgtgctccattgttagcaacaaaaaagccgactcacttgcagtcggctttctcattttaaacgaatgacgtttacttcgctttaccctggtttgcaaccgccgctgctttcgctgcgatctcgtcagcattacccagataatagcgtttcagcggtttgaaattctcgtcgaactcatacaccagcggcacgccagtcgggatattaagctcaagaatctcttcttcgctcatgttatcaagatatttcaccagcgcacgtaaagagttaccgtgtgcagcgatgatcacgcgctcaccgctcttcatacgcggcagaatagtttcattccagtaagggatcacgcggtcaatggtcagcgccaggctttccgtcagcggcagttctttctcgctcagtttcgcgtaacgcggatcgtgacccggataacgctcatcatctttagtcagttccggcggagtcactgcaaaaccacgacgccactgtttcacctgctcgtcgccatacttttcagcagtttccgctttgttcagaccctgcaacgcaccgtagtgacgttcgttcagtttccaggatttctcaacgggcagccatgcctgatccagttcgtccagcacattccacagggtatggatagcgcgtttcagcacagaagtgtaagcaaagtcaaagctgtaaccttcctctttcagcagcttacctgctgcttttgcttcgcttacgcctttctcagacagatccacgtcgtaccaaccggtgaaacggttttctttgttccactgactttcgccatgacgaaccagaaccagcttagttacagccatatacttactcctcaaatcatcttttaatgataataattctcattatattgccgcgacgaagcaacagcaatgcttacgcataaccatagcgaaaatagtggcgcagtgtaaggttgttgtgaatattgagttgcaaatatgtcggtgtttgctggtgatttgaacaatatgagataaagccctcatgacgagggcgtaacattactcagcaataaactgatattccgtcaggctggaatactcttcgccaggacgcaggaagcagtccggttgcggccattcagggtggttcgggctgtccggtagaaactcgctttccagagccagcccttgccagtcggcgtaaggttcggttccccggctcggtgtgccgccgaggaagttgccggagtagaattgcagagccggagcggtggtgtagaccttcagctgcaatttttcatctgcactccagacatgcgccgccactttcttgccatcgcctttggcctgtaacaagaatgcgtgatcgtaacctttcactttgcgctgatcgtcgtcggcaagaaactcactggcgatgattttggcgctgcggaaatcaaaagacgttccggcgacagatttcaggccgtcgtgcggaatgccgccttcatcaaccggcagatattcgtccgccagaatctgcaacttgtgattgcgcacgtcagactgctcgccgtcaagattgaaatagacgtgattagtcatattcaccgggcaaggtttatcaactgtggcgcgataagtaatggagatacggttatcgtcggtcagacgatattgcaccgtcgcgccgagattacccgggaagccctgatcaccatcatcactactcagggcaaacagcacctgacgatcgttctggttcacaatctgccagcgacgtttgtcgaacccttccggcccgccgtgcagctggttaacgccctgacttgggctaagcgtcacggtttcaccgtcaaaggtataacggctattggcgatacggttggcataacgaccaatagaggcccccagaaacgcggcctgatcctgatagcattccgggctggcacagccgagcagcgcctcgcggacgctgccatcggaaagcggaatacgggcggaaagtaaagtcgcaccccagtccatcagcgtgactaccatccctgcgttgttacgcaaagttaacagtcggtacggctgaccatcgggtgccagtgcgggagtttcgttcagcactgtcctgctccttgacttggtttacaaacgtaaaaagtctctttaatacctgtttttgcttcatattgttcagcgacagcttgctgtacggcaggcaccagctcttccgggatcagcgcgacgatacagccgccaaatccgccgccggtcatgcgtacgccacctttgtcgccaatcacagctttgacgatttctaccagagtgtcaatttgcggcacggtgatttcgaaatcatcgcgcatagaggcatgagactccgccatcaactcgcccatacgtttcaggtcgccttgctccagcgcgctggcagcttcaacggtgcgggcgttttcagtcagtatatgacgcacgcgttttgccacgatcgggtccagttcatgcgcaacagcgttgaactcttcaatggtgacatcacgcagggctggctgctggaagaaacgcgcaccggtttcgcactgttcacgacgggtgttgtattcgctgccaaccagggtacgtttgaagttactgttgatgatgacgacagccacacctttgggcatggaaactgctttggtccccagactgcggcaatcgatcagcaaggcatgatctttcttgccgagcgcggaaattagctgatccatgatcccgcagttacagcctacaaactggttttctgcttcctgaccgttaagcgcgatttgtgcgccgtccagcggcagatgataaagctgctgcaatacggttccgaccgcgacttccagactagcggaagaacttaacccggcaccctgcggcacattgccgctgatcaccatgtccacgccgccgaagctgttgttacgcagttgcagatgtttcaccacgccacgaacgtagttagcccattgatagttttcatgtgcgacaatgggcgcatcgagggaaaactcgtcgagctgattttcataatcggctgccatcacgcgaactttacggtcatcgcgtggtgcacaactgatcacggtttgataatcaatcgcgcagggcagaacgaaaccgtcgttgtagtcggtgtgttcaccaatcaaattcacgcggccaggcgcctgaatggtgtgagtggcagggtagccaaatgcgttggcaaacagagattgtgttttttctttcagactcatttcttacactccggattcgcgaaaatggatatcgctgactgcgcgcaaacgctctgctgcctgttctgcggtcaggtctcgctgggtctctgccagcatttcataaccaaccataaatttacgtacggtggcggagcgcagcagaggcggataaaagtgcgcgtgcagctgccagtgttgattctcttcgccattaaatggcgcgccgtgccagcccatagagtaggggaaggagcactggaagaggttgtcataacgactggtcagctttttcaacgccagcgccagatcgctgcgctgggcgtcggtcaaatcggtgatccgtaaaacgtgggctttgggcagcagtagcgtttcgaacggccaggcagcccagtaaggcacgacggctaaccagtgttcggtttcgacaacggtacggctaccgtctgccagctcgcgctgaacataatccaccagcattggacttttctgttcggcaaaatattctttttgcaggcggtcttcgcgctcagcttcgttaggcaggaagctatttgcccaaatctgaccgtgcggatgcgggttagagcagcccatcgccgcgcctttgttttcaaaaacctgcacccatgggtacgttttccccagttctgcggtttgctcctgccaggttttgacgatttccgtcaatgctgcaacgctgagctctggcagcgttttactgtgatccggactaaagcagatcacccggctggtgccgcgcgcgctctggcaacgcatcagcggatcgtgactttctggcgcatctggcgtgtcagacatcaaagccgcaaagtcattagtgaaaacgtaagtcccggtgtaatcggggtttttatcgcctgtcacccgcacattacctgcgcagaggaagcaatctggatcgtgcgcaggtaacacctgtttggctggcgtttcctgcgccccctgccaggggcgcttagcgcggtgcggactaaccagaatccattgcccggtgagcgggttgtagcggcgatgtggatgatcaacgggattaaattgcgtcatggtcgttccttaatcgggatatccctgtggatggcgactctgccagtgccaggtgtcctgcgccatttcatcgagtgtgcgcgttacgcgccagttcagttcacggtcggctttgctggcgtccgcccagtaggccggaaggtcgccctcgcgacgcggtgcaaaatgataattaaccggtttgccgcaggctttgctgaaggcattaaccacgtccagcacgctgttgcctacgccagcgccgaggttgtagatgtgtacgcctggcttgttcgccagtttttccatcgccacgacgtgaccgtccgccagatccattacgtggatgtaatcgcgtacgccagtaccatcttcggtcggataatcgttaccaaaaatcgccaggctgtcgcgacggcctacagcaacctgggcgatgtatggcatcaggttattcggaatgccttgcggatcttcgcccatatcgccgctcggatgcgcgccaaccgggttgaagtagcgcagcagggcaatgctccagtccggctgggctttttgcagatcggtgaggatctgttccaccatcagcttgcttttgccgtaagggctttgcggtgtgccggtcgggaagctttcaacgtatggaattttgggctgatcgccataaacggtggcggaggagctaaaaataaagtttttgacgttagcggcgcgcatggcgctaatcaggcgcagagtgccgttgacattgttgtcgtaatattccagcggtttttgtacgctttcgcccacggctttcagcccggcgaagtggatcacggtgtcgatagcgtgatcgtgcaggatctcggtcatcaacgcttcgttacgaatatcgccttcaacaaacgttggatgtttgccgcctaaacgctcgataacaggcagtacgatgcgcttactgttacagaggttatcaagaatgatgacatcatgaccgttttgcagtaattgcacacaggtatgacttccaatgtaaccgctaccaccggtaaccagaactctcataattcgctccattaggcttatggtatgaaataaccatagcataacaaagatgcgaaaagtgtgacatggaataaattagtggaatcgtttacacaagaatttagccgttttttatgcgcgattaagtgattataaaacagagggtttatgaatgattgcgctttttatctgaaaaaagacgcggtttcatgcctgcatgcgtcgaaccgttggccggagagggtgctaaggccgcctccggcaaggtcagcactaccgactcaatatatttttgtcagcacatagcgatagagtccaccgtccggcacgaactcaagacgatgggtaatacaggcaggcgcatcttcagcgtggtggctaacaaacaacaattgcgtttcaccttcgctaatcagcacatcaacaaaacggcggataagctggcgattcagcggatcaagcccctgtagtggttcatcgagaataagcaacgtcggatgtttcaccagtgcgcggacaatcagcgccagacgctgctgtccccaggaaagactatggaacggagcgtcagccgtgcgtttatcaatgccgagaatatccagccactgctgcaccagtttttgctggcgatcgctaacggcctgataaatgccaatgctatcaaaatagccagaaagaatcacattacgcacggtagtgctgacccggtaatccagatgcaaactactgctgacgtaaccgatatgctttttgatatcccagatggtttcgccgctgccgcgacgtcgtccgaaaagcgtcaaatcgttgctgtaaccttgcggatgatcgccagtaaccaggcttaataacgtgctttttcctgcaccatttggcccgacaatttgccagtgttcgcctggattcacctgccagctaaggttattaagaatggggcgatcgttataagaaaccacgccattgttcagcacaatgcgcggttcgttggcgggtaaggcgtgacgtgcactaggttcatccggctccggcagttgcacaccttcaagctgttcactatgcgccagttgcgcgacgagtgcttgttggagcagttcctctttagcgccagtttccgctaacgtgcaatccgccagcacgccagcaaactggacaaactccgggatctcatcgaagcgattgagcaccagtaccagagtaataccggactgatgtaagctggcgagtcgctcagccagctgctgacgactggcaacatccaggccatcgaacggctcatcaagaatcaacaagtcaggctcgctcatcagcgcctgacacagcagggtttttcgcgtctcgccagtggaaaggtatttaaagcgtcggtcgaggagggcggtaataccgaactgctgcgccagttgcatgcaacgcggtgcatcctttacttcatcctgaatgatctcagccgtagtgcgtccggtgtcatcttcgccagggccgagcatatcggtgttattccgctgccattcgtcgctgacgagtttttgcaattgctcgaaggagagacgagtgatgtgggaaaactggctttgccgttcacctttcaaaagcggaagttcccccgccagcgcgcgggccagggcgcttttcccgcttccattgctaccgacaaacgcccaactatcacccgcgtttaacgttagctgaggcaattgcagcgtttttgtgtcgctaagacgaaacgtgccttgcaaaatttgcaagctactcattttatatcccactttgtgcagcgattactgacagggatacgtgtttcataacaaattgtcaacacgcttagcacagcgtggcgataatcacgctgtcggcattaaagtaggccgtgacattctgtccttgctgaagagaagtcgcttcatttaccggcactgtggcgcacagtgtttgcccgtcgggtagcgccattaatacttcgcactgctctgcgccgcgctcaatatgactaataatacccggtaattggttgtcagcgttttgcgcgaccgcctcgtcctgagtaatacctacccacggcgcttttagcaatatcaacacttctttgccttcatccagccccagacgcgcgccgctttgtgcggtaattgcgactttcaggcgtgtttttccgtcagccagtaagacatcaacatgctgttgaacgtcatcatgatcgcgggcggtgatggtaccgaaccactggttacgggcgctggtttgcagactaaaacgactgatcgcggccagcaggctgttcagcggcagggcgtcatcgtcacttaacacatcaaaggctttttgctggatttgcgccagtaagtcatagagctgaatcagtcgctgaccatagcgggtcagtactgcgccgccgccacctttaccgcctgttgcgcgctcgaccagaatatgctcacttaactgattcatctcgttaatggcatcccaggcgcttttatagctaataccggcatctttcgctccctggctaatggaaccggaaagcgcaatgtgttttagtaggctaatgcggcgcgggtcggcgaataatttttgttggagcttaagggtgagaaggatttcggcctgcataacaatgtcctggcaaaagtcttattgtgacggaaaacgaacgccacgcaaagctgaccgcacaaaaggggagtgcttttctgtgcttagcggttagaatagtctcatgactatatctggagttgaccatgttagagttattaaaaagtctggtattcgccgtaatcatggtacctgtcgtgatggccatcatcctgggtctgatttacggtcttggtgaagtattcaacatcttttctggtgttggtaaaaaagaccagcccggacaaaatcattgattccctgaatgcccgcttagtcgggcattttctttttctcaacttcctgcttttcctgccgatattttttcttatctacctcacaaaggttagcaataactgctgggaaaattccgagttagtcgttatattgtcgcctacataacgttacattaaggggttaccaatggctcgtaaatggttgaacttgtttgccggggcggcactctctttcgctgttgctggcaatgcactggcagatgaagggaaaatcacggtgttcgccgccgcaagtctgactaacgcaatgcaggacattgctacgcagtttaaaaaagagaaaggcgtggatgtggtttcttctttcgctagcagttctactctcgcccgtcagattgaagcgggtgcgcctgcggatctgtttatttctgccgatcagaaatggatggattatgcggttgataaaaaagcgatcgatacagctacgcgtcagacactgctcggcaatagcctggtcgttgtagcaccgaaagccagcgtgcagaaagatttcaccatcgacagcaaaaccaactggactagtctgctgaatggcggtcgcctggcggttggcgatccggaacatgttcccgctggcatttatgcaaaagaagcactgcaaaaactgggcgcatgggatacgctctctccgaaactggccccagcggaagatgttcgtggggcgctggcgctggtcgaacgtaacgaagcgcctctgggcattgtctacggttctgacgcagttgccagcaaaggggtaaaagtggttgccaccttcccggaagatagtcataaaaaagtggaatatccggttgctgttgtggaagggcataacaatgcgacagtgaaagcattttatgattatctgaagggaccgcaggcagcggaaatctttaaacgttacggatttacaatcaagtaatgatactgaccgatccagaatggcaggcagttttattaagcctgaaagtttcttccctggctgtgctgtttagcctgccgtttgggatcttttttgcctggttactggtgcgttgcacgtttccgggcaaagctctgctcgacagcgtactgcatctaccgctggtgttaccgcccgtggtcgtcggttacttattattagttagcatgggacggcgcggatttatcggtgaacgtctgtatgactggtttggtattaccttcgcctttagctggcgcggcgcggttctcgctgccgccgtcatgagctttccgctgatggtgcgggcaattcgtctggcgctggaaggggttgatgtcaaactggaacaggccgcaagaacactgggggccgggcgctggcgcgttttctttactatcacgttaccgctgaccttaccgggaattattgttggtacggtactggcttttgctcgttctctcggtgagtttggtgcaaccatcacctttgtgagcaacattcctggtgaaacgcgaaccattccttctgccatgtataccctgatccagacccccggcggggaaagtggagcggcgagactgtgcattatttctattgcgctggcgatgatctccctgttgattagtgaatggctggccagaatcagccgtgaacgggcggggcgctaatcatgctggaactgaatttttcccagacgttgggcaaccattgcctgactattaatgaaacgctgcccgccaatggcatcactgctatctttggcgtctccggtgccggaaaaactagcctgattaacgccatcagtggactgacgcgcccgcaaaaagggcggattgtcctcaatgggcgggtactaaatgatgccgaaaaaggtatctgcctgacgccggaaaagcgtcgcgttggctatgtttttcaggatgcgcggctgttcccgcattacaaagtgcgtggcaatctgcgctacggcatgagcaaaagtatggtcgatcagttcgataagctggtggcgcttttaggcattgaaccgttgcttgaccgtttaccaggcagcctgtccggaggcgaaaaacagcgcgtggcgattggtcgggctttgctgacagcaccggaattgctgttgctggatgaaccgctggcgagtctggatattccgcgtaaacgcgaactgttgccttatctgcaacggctgacacgggaaatcaacattccgatgttgtatgtcagccatagcctggatgagatcctccatctggcagacagagtgatggtactggaaaacggtcaggtgaaagcctttggcgcgctggaggaagtgtggggcagtagcgtgatgaatccgtggctgccgaaagagcaacaaagtagcattctgaaagtgacggtgcttgagcatcatccgcattacgcgatgaccgcgctggcgctgggcgatcagcatttgtgggtcaataagctggacgaaccgctgcaagctgcgctacgtatccgcattcaggcttccgatgtttctctggttttacaaccgccgcagcaaaccagcattcgtaacgtattgcgggcaaaagttgttaatagttatgacgacaacggccaggtggaagtggaactggaagtcggcggtaaaacgctgtgggcgcgtatcagcccgtgggccagggatgaactggcgatcaaacctggcctgtggctgtacgcgcaaattaaaagtgtgagcataaccgcctgattaaatcaggtggctataaatgaactgggcaatgctgtcggtggtgttatcaccaatcacaatgttggcgcgcgcttttaccgcgtcatcggcgttgcccatcgccacgcctgtaccagcggcttccagcatactgatatcattaaagttatcgccgaatgccacgacgttttccatgctccaaccttgcgcctcaacccatttcgtcaaacgtttacctttgctgttgccgccgcgtgcaatatcaacctgatcgtgccaggaccattcacactccagtcccagttcatgttcgacatgcttaccaaaatgctgcaattgcggcaggtcatcgtgcgtcagggcgaacttccatacggcgttaacttgttgcgccgtttcagccagagaagcgacttgtgtgaaagtcggacgctgttccggcggcagggtttgcgcccagttagatgtgcgaatgacatgcccggtcgggtgctcatagaccattgcatcatcgacatacatcagaccgtgaatgtggtgttcattcagcatctcaatgagttgcagggctttaataacgggcattgggtccgcttccagcacggtttttgcatgataatcatacaaataggtgccattacagcaaatagcaggtgtatccagcgccagcgcctgataaaaaggatgaatagcgacgtgatggcgacctgtgacgatgattaattgatagcctgcttcgcgagcgcgggccagggcttctatgctactaggaagcagggtctttttcggggtcaataaggtgccgtctaagtcgagagcaatcacgcgtgtggtcatggcgtattccagattaaggttaagaattttcgtctgcgcgaatggtacaccgataccactatcggacaaaattctgcgttttaattcagcattcaccgccaaaagcgactaattttagctgttacagtcagttgctaaatgcaaaggagcattcatgaagcaaacagtttatatcgccagccctgagagccagcaaattcacgtctggaatctgaatcatgaaggcgcactgacgctgacacaggttgtcgatgtgccggggcaggtgcagccgatggtggtcagcccggacaaacgttatctctatgttggtgttcgccctgagtttcgcgtcctggcgtatcgtatcgccccggacgatggcgcactgacctttgccgcagagtctgcgctgccgggtagtccgacgcatatttccaccgatcaccaggggcagtttgtctttgtaggttcttacaatgcgggtaacgtgagcgtaacgcgtctggaagatggcctgccagtgggcgtcgtcgatgtggtcgaggggctggacggttgccattccgccaatatcagtccggacaaccgtacgctgtgggttccggcattaaagcaggatcgcatttgcctgtttacggtcagcgatgatggtcatctcgtggcgcaggaccctgcggaagtgaccaccgttgaaggggccggcccgcgtcatatggtattccatccaaacgaacaatatgcgtattgcgtcaatgagttaaacagcagtgtggatgtctgggaactgaaagatccgcacggtaatatcgaatgtgtccagacgctggatatgatgccggaaaacttctccgacacccgttgggcggctgatattcatatcaccccggatggtcgccatttatacgcctgcgaccgtaccgccagcctgattaccgttttcagcgttagcgaagatggcagcgtgttgagtaaagaaggcttccagccaacggaaacccagccgcgcggcttcaatgttgatcacagcggcaagtatctgattgccgccgggcaaaaatctcaccacatcagcgtatacgaaattgttggcgagcaggggctactgcatgaaaaaggccgctatgcggtcgggcagggaccaatgtgggtggtggttaacgcacactaaccgctgatttacccggcgcagtctctcctgcgccggtgtattaacctatctcctgtaacgcgtgtctctggcgttcgacgatattggtccacaaattgtctttatcgtcagtccataaattaatcagcaaggcaaaaaagcgttctgctgctggagaaagtacggcatctttacggcgaattattcccaatgttcgacgtataacgggttccaccaatgggataccaataatgctagaatagggcgcatgaggcattgccaggccaggaagcgcgctaatccccagtcccgcctccaccagtcctaaactcgtgctaagatgacgcacttcgtaaaaccagtccagcttccagggcttgtcggccagctgttgttctatcaacagtcggttgccgctggaggagcgtacgccaatcattttgtaacccactaactcctgccattctacaagctgctttttggccaatggatggtcacgccgacaggccagcacgaacggctcgttgaccagtggggtaaaatcaatggaactatttgtgacgttgttcatgtttatgccaaagtcactttcgttacacagcacgctttccatgcaattattcgtgccttgttccagaatccgcactttaatattgggatacagctcattaaatttaccgattgccagcggtaaaaaataaaatactgcggtcggaatacacgctaacgtcaccataccacgatgataagcattcatatcacgaatattaaaaagcgtttcatcgaatttctttattaattcccgcgcctccgggagcaacctttttcctgcttttgttaacgtaaccttgcgagttgtacgctcaaatagttgaacatgtaaatcttcctccatcttttttattcttcgcgttaatgcaggttgcgtaatattgagtaatttagcggcattgttaaagctactggactctgccagtatgacaaatgccttcatactacttaattcatgcttcattattactccggaaaatggaaggctgctttttgggtggctggccgttaaaaattttaactgcatttagccaacttaaattaatgaaaaaatgttattaatcgttgagctaaagtcattagagatgctttgcccttaatgtaaccatatcgcaataagttatgtttttaaattgagggcattattatgaaaaaaataccctgcgtgatgatgcgaggtggaaccagcaggggcgcgttcctgttagcggaacatttacccgaagatcaaacgcagcgcgataaaatattgatggcaattatgggttccggtaacgatctggaaattgacggtattggcggcggtaatccactgaccagtaaagtcgccattattagccgttccagcgatccgcgtgctgatgtcgattatctgtttgcgcaggtaatcgttcatgagcaacgtgtcgataccacgcctaactgcggcaatatgctgtctggtgttggggcattcgccattgaaaatggtttgattgcagcgactagcccagttactcgcgtacgtatccgcaacgtcaatacgggtacgttcatcgaagctgatgtgcaaacgccaaatggtgttgtcgagtacgagggtagcgccagaattgacggcgtaccgggtactgccgcaccggttgcgctcactttcctgaatgccgctggaaccaaaaccggaaaagttttcccgactgataatcagattgattattttgacgatgtcccggtgacctgtatcgatatggcgatgccagtcgtcattattccggctgaatatctgggaaaaacaggttatgaattaccggcggaactggatgccgacaaagcattattagcccgcattgaatctatccgtctacaagcgggtaaagcaatgggcttaggtgatgtcagtaatatggttatccctaaacctgtgcttatttctccagcgcagaaaggcggggcaattaatgtgcgttattttatgccgcattcttgccatcgcgcgctggcgataaccggtgctattgctatttccagtagttgtgcattggaaggcaccgtcacccgacaaatcgtcccttctgtaggatacggcaatatcaatattgaacaccccagtggtgcgctcgacgttcatttaagtaatgaaggtcaggatgccacgacgttacgcgcatctgttattcggacgaccagaaaaatattttccggtgaagtttatcttccctgaaaaaattcgttgtcaggataaggacaatcaataaaggacttctgtatgagtcatacagaaagaacaggattttaaatgaataagaaaagcttatggaagctaattctgatattagcgatcccatgtattattggttttatgccagctccggcaggattaagcgaactggcgtgggtgctttttggtatttacctggcggccattgtggggctggttatcaagcctttcccggaacctgtcgtactgttaattgccgttgctgccagtatggtggtggtcggtaacttatccgacggtgcgtttaaaaccaccgccgtattaagcggttactctagtggtaccacctggctggtgttcagcgcgtttaccttaagcgccgcatttgtgaccaccggtttaggtaaacgtattgcctatctgctgattggtaaaatcggtaacaccacgctgggtctgggttacgttacggtattcctcgatctggtactggctccggcaacaccgtctaacaccgcgcgtgcgggcggcattgtgttaccgatcatcaacagcgtggcggtggctttggggtccgaaccggaaaaaagtccgcgtcgtgtcggacattacctgatgatgtccatttacatggtcaccaaaaccaccagctatatgttctttaccgcaatggcggggaacattctggcgctgaaaatgatcaacgacattctgcacctgcaaattagctggggtggatgggcgctggcagccggattgccgggcatcattatgctgctggtcaccccgctggtgatttacaccatgtatccaccagaaattaagaaggtggataacaaaaccatcgctaaagcgggccttgccgaactaggaccgatgaaaatccgcgaaaaaatgctgctcggtgtctttgtgctggcgctgctgggctggattttcagtaagtctctgggggttgatgaatccaccgtggcaatcgttgttatggcaaccatgctgctgctgggtatcgttacctgggaagacgtggttaaaaataaaggcggctggaataccttaatctggtacggcggtattatcggcttaagctccttattaagcaaagttaaattcttcgaatggttagctgaagtctttaaaaataacctggcatttgatggtcacggtaacgttgctttcttcgttattattttcctcagcattatcgtgcgttatttcttcgcttccggtagtgcctatatcgttgctatgttaccggtatttgccatgctggcgaacgtctccggcgcaccgttaatgttaaccgcgctggcactgttgttctccaactcctatggcggcatggttactcactatggcggcgcggcaggtccggtcatctttggcgtgggttataacgatattaaatcctggtggttggtcggtgcggtactgacgatattaaccttcctggtgcatatcaccctcggcgtgtggtggtggaatatgctgatcggctggaacatgctgtaaatattctcgtcatacttcaagttgcatgtgctgcgtctgcgttcgctcaccccagtcacttacttatgtaagctcctggggattcactcgcttgtcgccttcctgcaactcgaattatttagagtatatccatttattatctttctgcgcacttcacggtgcgcagatatctggagcatttgatgatcaagttatctgaaaaaggcgtgtttctcgccagtaataacgaaataattgccgaagaacatttcaccggcgaaattaaaaaagaagaagccaaaaaaggcactattgcctggtctattctctctagccataatacgtccggaaatatggataaacttaaaattaagtttgatagtttagcctctcacgatattacctttgttggtattgtacagaccgctaaagcgtccggtatggaacgtttcccgctgccgtatgtgctgaccaactgccataacagtctctgcgccgtcggcggcactattaacggtgatgaccatgtttttggtttaagcgcggcccagcgttatggcggtatttttgtgcctccgcatattgcggtcatccatcaatatatgcgtgagatgatggcaggcggcggcaaaatgatcctcgggagtgacagccacacccgttacggtgcattagggacaatggcagtcggtgagggcggcggtgagttggtaaaacagctgcttaatgacacctgggatatcgactatccgggcgtggttgcggtgcatctgaccggaaaacctgcgccgtatgtggggccacaggatgtggcgctggctatcattggcgcggtgttcaaaaacggttacgtcaaaaacaaagtcatggagttcgttggaccgggcgttagcgcgctctctaccgatttccgtaacagcgttgacgtgatgaccactgaaacgacctgtttaagttctgtctggcaaaccgatgaagaagtccataactggctggcgctgcacggtcgcggccaggattactgccagcttaaccctcaaccgatggcgtactacgatggctgcatcagcgttgatttaagcgccatcaaaccaatgattgcgctgccgttccacccgagcaacgtgtatgaaatcgacacactgaaccagaacctgaccgacattctgcgtgagattgaaattgagtccgaacgcgtggcgcacggtaaagccaaactcagcctgctggataaagtggaaaatggtcgcctgaaagtgcagcaggggattatcgcgggctgttctggcggtaactacgaaaacgtcatcgcggcggcgaatgcactgcgcggtcaatcctgtggcaatgacaccttcagcctggcagtttacccgagtagtcagccggtgtttatggatctcgccaaaaaaggtgtggtagcagatttgattggcgcaggcgcaatcatcagaaccgcgttctgcggcccatgctttggcgcgggcgatacgccaatcaacaacggtttgagtattcgccacaccacgcgtaacttcccgaaccgcgaaggctctaagccagctaatgggcagatgagtgcggtggcgttgatggacgctcgttctatcgctgcgactgcggcaaacggtggctatttaacctctgccagcgaacttgattgctgggacaacgtgccggagtacgccttcgatgtaacgccgtataaaaaccgtgtttatcagggctttgtgaaaggggcaactcagcaaccgctgatttacgggccgaacattaaagactggccggaattgggtgcgctgactgacaatatcgtcctgaaagtgtgcagcaagatcctcgacgaagtgaccaccaccgacgaactgattccttccggtgaaacctcttcttatcgtagtaatccgattggtctggcggagtttaccctgtctcgccgcgatcccggttatgttagcagaagtaaagcgactgctgagctggaaaatcagcgtctggcggggaatgtcagcgagctgacagaggtgtttgcgcgcattaagcagattgctggtcaggagcatattgatccgctgcaaactgaaattggcagcatggtctatgcggtgaaaccaggcgatggttctgcgcgtgaacaggcggcgagctgccagcgtgtgattggcggtctggcgaatattgccgaggagtacgcgactaaacgctatcgttctaacgtcatcaactgggggatgttaccgctgcaaatggcggaagtaccaacctttgaagtgggggattacatttacatccctggcattaaagcggcgctggataatccgggtacgacgtttaaaggttatgtgatccatgaagatgcgccggtaacggaaattacgctctatatggaaagtctgactgctgaagagcgcgagattatcaaggcgggtagtttgattaacttcaataaaaaccgtcagatgtaaaaagcgccatgtgaatgtaggtcgcattcggcacttattgtcggatgcgatgcttgcgcatcttatccgacctacgaatcgcatcgaatctgtaggccagataaggcattttcgcagcatccggcacttattgtcggatgcgatgcttgcgcatcttatccgacctacaaatcgcatcgaaccgtaggccggataaggcgtttacgccgcatccggcaaatagttaattgcccttacttcttcgcctctgcaaccactttactacccacgccgcggttattgtattcccacatgcggttgtagttagtgtcattcagattgcgctgtatttcgtcgttatcatctacgctgccggtattacccgcaaacggacgattagagatcaccgcatcggcccacggtttagccgtgttaaaaccttcgttgatggcgctatcacggatcaccacctgaccgttggtattggcatcaacatccaggctgcggcccagttgcgccacaccatcaccgaaagcattgaaacggctgtttacggcgaggaaaccgtagtaaatgttggacagcgtagccggtgcaaacacatacgcttcttgctgagtacgactgttcaccacgcggaattcggtgttatcgaacaccactgcgccgcgaccagaaacgatatccacatccccttcaatgtagctgttggtcaccagcgtacgcggctgacgattcgtttccagacggttctgcacaccgctgttggtgacaaagaaggtgttctgacgaccgagaatgttaacgttgttaatctgtacctggtcaccatcagtacgcagtgccaccgccggatggttacctgcatctacgctatcgcccagcgtgttttcgatggtcagattttgcagttgcaggccattgttttgactccagaagaccgcagagcagagaacaccgatactgtcgctgcgtttgctctggcagctatcgtacatataccacgctggtttacctggcatatatttgccgcgcgggttgacgtcgtgacgccagtcggcagggctcatgccaccattaagggaaagcccaatcttcacatcaatcggtttttcacctgtaccgtacagagtaattccacccggagcggcagggacatataccgttccctgatactcaccaggcatcacggcaatatactggcgcttgttggtacgcttgataattgccgcatctaccgccgcctgaatcgtggtatgcgttacaccttgagtgcccgccgggccgacaacaaagtcaggttgcgcaggcagggtaatcggggaaggattccacgctgcagcacctggtgtcagggatgcaaaatagtgttgagcatcgaaattctgcgcttcttttgcgctcagaatcgggcgagaagaggtaccaggcgcggtttgatcagaaggacgttgatcgggcggggtactgctacaggcggtcagcgtcacgccaaaagccaatgccagcgccagacgggaaacactaaatgtgttcacaggttgctccgggctatgaaatagaaaaatgaatccgttgaagcctgcttttttatactaacttgagcgaaacgggaaggtaaaaagacaaaaagttgtttttaatacctttaagtgataccagatggcattgcgccatctggcagagtgattaactaaacatcgcagtaatgctggcgcttgccagagagtggaaatgaacgttaaacccgaccatcgcgccgctggcaccttcatcgacatcaatacgttctatatccagcgcgtgaacggtaaaaatgtagcgatgagtttcgcctttcggcggtgctgcgccatcgtacccggttttaccaaagtcggtacgcgtctgcaaaacgccgtctggcattgctaccagaccagagccaaacccttgcggtaatacgcgggtatcagcgggtaagttaacaactacccagtgccaccagccggagccggttggcgcatccgggtcgtagcaggtgacaacaaaacttttcgttcccgcaggaacatcatcccacgccagatgcggactaatattatcgccatcgtaacccatgccgttaaagacatgacgatgcggcaatttatcgccatcgcgcagatcgttactgatgagtttcatgaaccctcctttcttgtttgcagaaagtgtagccagaaaccctcacgcggacttctcgttattggcaaaaaaatgtttcatcctgtaccgcgcggttaaccgctgcggtcagacgctgcaactgttgcgggagaataatatagggcggcatcaggtaaatcagtttgccaaaaggccggatccagacaccctgttcgacaaagaatttttgcagcgccgccatattcaccggatgagtggtttcgaccacgccaatggcccccagtacgcgcacatcggcaaccatttcggcatcacgggcgggggcaagttgctcgcgcagctgtacttcaatatccgccacctgttgctgccagtcgccagattcgagaatcgccaggctggcgtttgctgccgcgcaggccagcggattgcccataaaagttggcccatgcataaagcaaccggcttcaccgttactgatggtttctgcaacctcgcgcgtggtgagtgtggcggaaagggtcattgtgccgccggttaaggctttaccgaggcacaaaatgtccggcgcgatttctgcatgttcacaggcaaacagtttcccggtacgaccaaatccagtggcgatctcgtcggcaatcagcaagataccttcgcgatcgcatattttgcggattcgttttaaccattccggatggtacatgcgcatcccgcctgcgccctggacaatcggctcaatgatcaccgccgcgatttcatgacgatgcgccgccatcaggcgggcaaagcccaccatatcgcgctcatcccattcgccatccatgcggctttgcggggcgggagcaaacaggttttctggcaggtagcctttccacagactgtgcatactgttatccggatcgcacacgctcatcgcgccaaaggtatcgccatgataaccattgcggaaggtcagaaaacgctggcgcgcttcgcctttggcttgccagtactgcaacgccattttcatcgccacttccaccgctacggaaccggagtccgcgagaaaaacgcactccagcggttgcggcgtcatcgccaccagtttgcggcacagctcaatggctggcgcatgggtgataccgccaaacatcacatggctcatggcatcaatttggctcttcatcgccgcattaagctgcgggtgattgtagccgtggatcgccgcccaccaggagctcataccgtcaaccaggcgtctgccgtcagacaaaatcagctcgcaaccttcggcgctcaccaccggataaaccggcagaggggaggtcatggatgtgtatgggtgccagatatggcgttggtcaaaggcaagatcgtccgttgtcataatcgacttgtaaaccaaattgaaaagatttaggtttacaagtctacaccgaattaacaacaaaaaacacgttttggagaagccccatggctcaccgcccacgctggacattgagccaagtcacagaattatttgaaaaaccgttgctggatctgctgtttgaagcgcagcaggtgcatcgccagcatttcgatcctcgtcaggtgcaggtcagcacgttgctgagcattaagaccggagcttgtccggaagattgcaaatactgcccgcaaagcagccgctacaaaaccgggctggaagccgagcggttgatggaagttgaacaggtgctggagagcgcgcgcaaagcgaaagcggcaggaagcacgcgcttctgtatgggcgcggcgtggaagaatccccacgaacgcgatatgccgtacctggaacaaatggtgcagggggtaaaagcgatggggctggaggcgtgtatgacgctgggcacgttgagtgaatctcaggcgcagcgcctcgcgaacgccgggctggattactacaaccacaacctggacaccagcccggagttttacggcaatatcatcaccacacgcacttatcaggaacgcctcgatacgctggaaaaagtgcgcgatgccgggatcaaagtctgttctggcggcattgtgggcttaggcgaaacggtaaaagatcgcgccggattattgctgcaactggcaaacctgccgacgccgccggaaagcgtgccaatcaacatgctggtgaaggtgaaaggcacgccgcttgccgataacgatgatgtcgatgcctttgattttattcgcaccattgcggtcgcgcggatcatgatgccaacctcttacgtgcgcctttctgccggacgcgagcagatgaacgaacagactcaggcgatgtgctttatggcaggcgcaaacagcattttctacggttgcaaactgctggccacgccgaatccggaagaagataaagacctgcaactgttccgcaaactggggctaaatccgcagcaaactgccgtgctggcaggggataacgaacaacagcaacgtcttgaacaggcgctgatgaccccggacaccgacgaatattacaacgcggcagcattatgagctggcaggagaaaatcaacgcggcgctcgatgcgcggcgtgctgccgatgccctgcgtcgccgttatccggtggcgcaaggagccggacgctggctggtggcggatgatcgccagtatctgaacttttccagtaacgattatttaggtttaagccatcatccgcaaattatccgtgcctggcagcagggggcggagcaatttggcatcggtagcggcggctccggtcacgtcagcggttatagcgtggtgcatcaggcactggaagaagagctggccgagtggcttggctatagccgggcactgctgtttatctctggtttcgccgctaatcaggcagttattgccgcgatgatggcgaaagaggaccgtattgctgccgaccggcttagccatgccagtttgctggaagctgccagtttaagcccgagccagcttcgccgttttgctcataacgatgtcactcatttggcgcgattgcttgcttccccctgtccggggcagcaaatggtggtgacagaaggcgtgttcagcatggacggcgatagtgcgccactggcggaaatccagcaggtaacgcaacagcacaatggctggttgatggtcgatgatgcccacggcacgggcgttatcggggagcaggggcgcggcagctgctggctgcaaaaggtaaaaccagaattgctggtagtgacttttggcaaaggatttggcgtcagcggggcagcggtgctttgctccagtacggtggcggattatctgctgcaattcgcccgccaccttatctacagcaccagtatgccgcccgctcaggcgcaggcattacgtgcgagcctggcggtcattcgcagtgatgagggtgatgcacggcgcgaaaaactggcggcactcattacgcgttttcgtgccggagtacaggatttgccgtttacgcttgctgatagttgcagcgccatccagccattgattgtcggtgataacagccgtgcgttacaactggcagaaaaactgcgtcagcaaggctgctgggtcacggcgattcgcccgccaaccgtacccgctggtactgcgcgactgcgcttaacgctaaccgctgcgcatgaaatgcaggatatcgaccgtctgctggaggtgctgcatggcaacggttaataaacaagccattgcagcggcatttggtcgggcagccgcacactatgagcaacatgcagatctacagcgccagagtgctgacgccttactggcaatgcttccacagcgtaaatacacccacgtactggacgcgggttgtggacctggctggatgagccgccactggcgggaacgtcacgcgcaggtgacggccttagatctcagcccgccaatgcttgttcaggcacgccagaaggatgccgcagaccattatctggcgggagatatcgaatccctgccgttagcgactgcgacgttcgatcttgcatggagcaatctcgcagtgcagtggtgcggtaatttatccacggcactccgcgagctgtatcgggtggtgcgccccaaaggcgtggtcgcgtttaccacgctggtgcagggaagcttacccgaactgcatcaggcgtggcaggcggtggacgagcgtccgcatgctaatcgctttttaccgccagatgaaatcgaacagagcctgaacggcgtgcattatcaacatcatattcagcccatcacgctgtggtttgatgatgcgctcagtgccatgcgtagcctgaaaggcatcggtgccacgcatcttcatgaagggcgcgacccgcgaatattaacgcgtagccagttgcagcgattgcaactggcctggccgcaacagcaggggcgatatcctctgacgtatcatctttttttgggagtgattgctcgtgagtaaacgttattttgtcaccggaacggataccgaagtggggaaaactgtcgccagttgtgcacttttacaagccgcaaaggcagcaggctaccggacggcaggttataaaccggtcgcctctggcagcgaaaagaccccggaaggtttacgcaatagcgacgcgctggcgttacagcgcaacagcagcctgcagctggattacgcaacagtaaatccttacaccttcgcagaacccactagcccgcacatcatcagcgcgcaagagggcagaccgatagaaagtttggtaatgagcgccggattacgcgcgcttgaacaacaggctgactgggtgttagtggaaggtgctggcggctggtttacgccgctttctgacactttcacttttgcagattgggtaacacaggaacaactgccggtgatactggtagttggtgtgaaactcggctgtattaatcacgcgatgttgactgcacaggtaatacaacacgccggactgactctggcgggttgggtggcgaacgatgttacgcctccgggaaaacgtcacgctgaatatatgaccacgctcacccgcatgattcccgcgccgctgctgggagagatcccctggcttgcagaaaatccagaaaatgcggcaaccggaaagtacataaaccttgccttgttgtaaccattctgtatttggttaaattgcgagcgagatcgcgtcttcgattgactgcaatttaaccaattaaattctaaaataatcacgaaaaaaattttacttccgcctcatgcggcgaatgtgggaattgcccaggcggcgggggataggggctggagacagttatccactattcctgtggataaccatgtgtattagagttagaaaacacgaggcaagcgagagaatacgcggcttgcacgcgaattggcgttaaagacggctcaaagaaatatcttttattttttaactggttagataaatgcaatggcagtcactgaacaggcatctcttgccataaaactgtcatcactcatcttgacaaatgttaaaaaagccgttgctttggggataacccggtaaggccggagttttatctcgccacagagtaaattttgctcatgattgacagcggagtttacgctgtatcagaaatattatggtgatgaactgtttttttatccagtataatttgttggcataattaagtacgacgagtaaaattacatacctgcccgcccaactccttcaggtagcgactcatgagtaaaccgttcaaactgaattccgcttttaaaccttctggcgatcagccagaggcgattcgacgtctcgaagaggggctggaagatggcctggcgcaccagacgttacttggcgtgactggcagtgggaaaaccttcaccattgccaatgtcattgctgaccttcagcgcccaaccatggtacttgcgcccaacaaaacgctggcggcccagctgtatggcgaaatgaaagagttcttcccggaaaacgcggtggaatatttcgtttcctactacgactactatcagccggaagcctatgtaccgagttccgacactttcattgagaaagatgccagcgttaacgaacatattgagcagatgcgtttgtccgccaccaaagcgatgctggagcggcgtgatgtggttgtggtggcgtctgtttccgcgatttatggtctgggcgatcctgatttatatctcaagatgatgctccatctcacggtcggtatgattatcgatcagcgcgcgattctgcgccgactggcggagctgcaatacgctcgtaatgatcaagcattccagcgtggtactttccgcgttcgtggcgaggtgatagatatcttcccggcagaaagcgatgacattgcacttcgcgtggaactgtttgacgaggaagtggaacgattgagcttatttgacccgctgaccgggcagattgtttccactattccacgttttaccatctacccgaaaacgcactacgtcacaccgcgcgagcgcatcgtacaggcgatggaggagatcaaagaagagctggccgccagacgcaaagtgctgttggaaaacaacaaactgctggaagagcagcggctgacccagcgtacccagtttgatctggagatgatgaacgagctgggctactgtagcgggattgaaaactacagccgcttcctctccggtcgtggaccgggtgagccaccgccgacgctgtttgattacctgcctgccgatgggctgctggtcgtcgatgaatctcacgtcaccattccacaaattggcggcatgtatcgcggtgaccgggcgcgtaaagagacactggtggagtacggcttccgcctgccaagtgcgctggataaccgtccgcttaagtttgaagagttcgaagcattagcgccgcaaaccatctatgttagcgcgacgccgggtaattacgagctggaaaaatccggcggcgatgtggtggatcaggtggtgcgtccaaccggattgcttgacccgattatcgaagtgcggccggtggcgacacaggttgatgatcttcttagcgagattcgtcagcgagcggcaattaacgaacgcgtactggtcaccacactgaccaagcggatggcggaagatcttaccgaatatctcgaagaacatggcgagcgcgtgcgttatcttcacagtgatatcgacaccgtcgaacgtatggagattatccgcgacttgcgtctgggtgagttcgacgtgctggtagggatcaacttactgcgcgaaggtctggatatgccggaagtgagcctggtggcgatcctcgacgctgacaaagaaggcttcctgcgttccgaacgtagcttgatccagaccattggtcgtgcggcacgtaacgttaacggtaaagcgattctctacggcgataagatcaccccaagtatggcgaaagcgattggcgaaaccgaacgtcgccgtgagaaacagcagaagtacaacgaggaacacggaattacgccgcaaggcttgaacaagaaagtggtcgatatcctggcgctggggcagaacattgccaaaaccaaagcgaagggcagaggaaaaagccgcccgattgttgagccggataatgtgccgatggatatgagccctaaagcgttgcagcagaaaatccatgagctggaagggttgatgatgcaacacgcgcagaatctggagttcgaagaagcggcgcaaattcgtgaccagttgcatcagctgcgtgagctgtttatcgcggcaagctaacaggatagcgaagaagactgatgacaaacggaaaacagcctgatgcgctacgcttatcaggcctacattttctccgcaatatattgaatttgcgcggtttgtaggccggataaggcgttcacgccgcatccggcataaacaacgcgcactttgtcttcaataggaagccggaattttccttcggatttccgttaacctaaagcctgtaacgccttttccagcgcgttatgtaacaactggcggtcatgacgatacggaatatcgctggcctccagtacctcctggatcacaatccgctctttcaccgcgctgacatccacttttggcccgacgatgaccgcatcaatgacctttttaccaacatactgctccataattgccagcttgctttccagcttcaaattagccgcaggtaaactcaactcacgccccagattgccgatataaaccatcggcgctggcgtgcggcgtaatgcctgggcgatttccttcagcagcagaattggcatcaggctggtataaaaactgccaggcccaataatgatgagatccgcttcattgatagcgtgaaccgcctcacgcgttgcgggtacattaggcgttaacaataactcttgaatcggcgtagttaactggtcgatattgacctcgccgtaaacttcatgcccctgatcgtcaatcgccatcagatcaacaggatgctcactcattggaatcaaatgcgtatccactttcagcagattacgaattaaattgatggcttccagaggccgcacgctaaggtgatccagcgcctttaacatcaagtttccgagattatgaccggaaagttcgccattgccaccaaaacggtattcaaacatcgcggaggcgacgctcggttccgttatcagctggttgaggcagttgcgcatatcgccccaggcaatgccgccttcactacggcgaatacgccccgtgctgccaccattatcggtggtggtgacgatacccgttaaacgagaacccaaagagctaagactactgagaacgcgtcccagtccatgccctccgccgagagcaacgacacgatcaagatcagccagcgtacgattgcgcatatagtttcctggagtcagattatccgcgctacagtagcgcaaattgcggggaaacagcaattaacctgccaatattgaggatacaaactattttcttctacctctaaaggacgatgcacgctatgcctccctgatgatgtatatcaaagtaaaaccgccattttcccttattctgtagcgaaatagcacgatcatgacgctatatacatgattacatagcgaaagtgtggatggtaaaaatctcatttacacgctagtatcggcataaccactaaacactctagcctctgcacctgggtcaactgatacggtgctttggccgtgacaatgctcgtaaagattgccaccagggcgaaggaagaaatgacttcgcctcccgtatctggaaaggtgtacatggctagtcaactgactgatgcatttgcgcgtaagttttactacttgcgcctgagcattaccgatgtgtgtaactttcgttgcacctactgcctgccggatggctacaaaccgagcggcgtcaccaataaaggctttcttaccgtcgatgaaattcgccgggttacgcgcgccttcgccagactgggcaccgaaaaagtgcgcctgacaggaggagagccgtctttacgccgcgactttaccgatatcatcgccgctgtgcgggaaaacgacgctatccgccagattgcggtcacaaccaatggttaccgtctggaacgcgatgtggcgagctggcgcgatgcgggacttactggcattaacgtcagtgtcgacagtctggacgcccgccagtttcacgctattaccgggcaggataaattcaaccaggtcatggcagggattgatgctgcatttgaggccggttttgagaaggtcaaagtcaataccgtgctgatgcgtgatgttaatcatcaccagctcgacacctttctgaactggatccagcatcgccctatccagctgcgtttcatcgaactgatggaaacgggcgagggcagcgagctcttccgtaagcatcacatctctggtcaggttctgcgtgacgagctactgcgtcgcggctggatccaccaattacgtcaacgcagcgacggtcccgcgcaagtcttttgccatccagattacgccggagagattggccttatcatgccgtatgaaaaagacttctgcgccacttgcaaccgcctgcgcgtttcctccattggtaaactccatctctgcctgtttggtgaaggcggcgttaacctgcgcgatctgctggaagacgatacccagcaacaggcgctggaagcgcgtattagtgcggcgctgcgggagaagaaacagacccatttcctgcatcaaaacaacaccggtattacgcaaaacttaagctacattggcggctaaaacgtcaaaaggagagatcagatgagtcaggtaagcactgaatttatcccgacccgtattgctattcttacggtttctaatcgtcgcggtgaagaagacgatacctccggtcactatctgcgcgatagcgcgcaagaagcgggccatcacgttgtcgataaagccattgtgaaagaaaaccgctacgctattcgcgctcaggtatctgcgtggatcgccagcgacgatgtacaagtggtattgattacgggtggtactggcctgacggaaggtgatcaggctcccgaagcattgctgccgttgttcgaccgtgaagttgaaggttttggtgaagtgttccggatgttgagctttgaagagattggcacttccacgttgcaatctcgtgcggtagcgggcgtcgccaacaaaacgctgattttcgccatgccgggtagcaccaaagcgtgccgtaccgcatgggaaaatatcatcgcgccgcagctggatgcccgtacgcgtccgtgtaatttccatccacatttgaagaaataagtatgagccaactgacccatatcaacgccgctggcgaagcgcacatggtggatgtctccgccaaagcggaaaccgtgcgtgaagcgcgggcggaagcctttgtcaccatgcgcagcgagacgctggcgatgattattgatggtcgccaccacaaaggcgacgtatttgccactgcgcgtattgccggtattcaggcggcaaaacgcacctgggatctgatcccgctctgtcatccgctgatgctcagcaaagttgaagtcaatttacaggccgagccggagcacaatcgggtgcgtatagaaaccttatgccgcctgaccgggaaaaccggtgtcgaaatggaagcattaaccgcggcctccgtggcggcgctgaccatttatgacatgtgcaaagcggtgcaaaaagatatggtgattggtccggtacgtttgctggcgaagagcggcggcaagagcggtgactttaaggtggaagcggatgattaaagttctttttttcgcccaggtgcgcgagttggtgggaacagatgcaaccgaagtggctgcggatttcccaactgttgaagcgttacgccagcacatggctgcgcagagcgatcgctgggcgctggcgctggaagatggcaaattactggctgccgtcaaccagacgctggtgagttttgaccatccgctgactgacggcgacgaagtagctttcttcccgccggtaaccggaggttaagatggcagaaaccaaaattgttgttggtccgcagccgttcagcgtaggagaagagtacccgtggctggcggagcgtgacgaagacggtgcggtagtcacctttactggtaaggtgcgcaaccataacctgggcgacagcgtcaacgcattaaccctcgaacactatccggggatgactgaaaaagcactggcagaaattgttgatgaagcgcgtaaccgctggccgctggggcgcgtcactgtgattcaccgcatcggggaattatggccgggcgatgaaatcgtttttgtcggtgtcaccagtgcgcatcgcagcagtgcgtttgaagccgggcagtttattatggattatctcaaaacccgcgcaccgttctggaagcgcgaagccacgccggaaggcgaccgctgggttgaagctcgggagagcgatcagcaggcggcaaaacgctggtaattttttgttagccggataaggcaccgctgcgtccggcaatttcaccgctcagtacatacgtttacgctgcgtcgatgcacagcctcatcattttgcagtatccttaagatattccttatatcttcaggagatcgtcatggacagattcccacgttctgatagtatcgtacaaccccgggctggcttgcaaacttatatggctcaagtctatggctggatgaccgttggcttgttgctgaccgcatttgttgcctggtatgcggctaattccgcggccgtgatggagctgttgttcactaaccgtgtctttttaatcggtctgatcatcgcgcaattagcattggttattgtgttaagtgcgatgattcaaaagctgagcgcaggtgtaacgacgatgctctttatgctttatagcgcgctgacgggtcttacgctttccagtatattcattgtctataccgctgcttctatcgccagtactttcgtcgttactgccgggatgttcggcgcaatgagcctgtacggttacaccacgaagcgcgatttaagtggctttggcaatatgctgtttatggcgttaatcggcattgtgctggcaagcctggtcaacttctggttgaaaagcgaagcattgatgtgggcagttacctacatcggcgtgattgtctttgtcggattgacggcgtatgacacgcagaaactgaaaaatatgggtgagcagattgatacccgcgacacgagcaacctgcgcaaatattccattcttggcgcgttaaccttgtatctggacttcatcaacctgttcctgatgttgttgcggatcttcggcaaccgccgttaattctttttcaccatcactatcccggccatgtgtcgggatttttttcttactaaaaacgacacttaacaagtaccaggtataaaatatgccttatggacgagcggaagcgttttctgtatccataaatgcaaaagtattttgtatgcgtggttttaaatttattgatggtgaatattaatattttttctaaggataactaaaagaatggaaagttacagccaaaacagcaataaattagattttcagcacgaggccaggatattaaacggtatatggctcattaccgctttaggtttggtggcaaccgcaggactagcctggggagctaagtatatcgaaattacggcaaccaaatatgatagtccaccaatgtatgtcgccatagggttattattactttgtatgtatggcttaagtaaggatatcaacaagataaatgccgccatcgcgggcgtaatatatctgtttttactctctttggtggcgattgtcgttgcaagtttagttcctgtatatgccattatcatcgtgttcagcactgcgggcgcgatgtttttaatcagtatgctggccggtttattatttaatgttgatcctggttctcaccgttttatcattatgatgacgttgacagggttggccctggtaatcatcgtgaatgcggcattaatgagtgaacggcccatttggataataagttgcttaatgattgtgttatggagtggcattatcagccatggacgaaataagctccttgaattggcggggaaatgccatagtgaagagttgtggagtccggttcgttgcgcttttacaggtgcattaacactctattactattttatcggcttctttgggatacttgccgcgatagctataacgcttgtctggcaaaggcatacgcgtttttttcattaaccgtaaatgcacatactaaagaacttaactaaacttcacatcgccgcttcatttttcgcccgtagcttcttcgcctggctttccagcaacaggtaacagatcagcgccagcagcagtgggataaagtaatacagcacacggtaagcgagtagggcggcgataattgtacctttggaggtatgctccccagccagtagtgcgataaacaccgcttccagcacaccgatccccgccggaatatgcacgatgacgccagcaatactactaaccagtaacacgcccagtacaaagaaatagttcacgctttgaccaagtaacagccagataatcgcccccattaccatccagttaacgctggaaatcagcatctgagcgagggcgaatttccaactaggcagcaccagcttttgccctttgatggtcatatggcggtgcttcgcgaaagcgcaaaaccacaaataaaccgcgataatcatcagtaagccaatgccgagaatacgcagcgtagtttgatcgacataccagtgatccggcaactccaccacgcctgcggtaaagataatccctgccagtaaaatgtagcccagccagttggtggtaatactgaggctgaaaatccgcgtaatagtgctaccgggcaaccccagacgagagtacaaacgatagcgcataccaatgccgccgacccaggtactgagcgtcaggttgaaggcgtagcagataaagctcaccagcatcacctggcgcttcgccagtttgtgaccgcagtaaaagcgggcgagcaggtcatagcagccgtaaatcagatagctgacgaccaccagcccgaccgcactaagcagcgcaacgcgattgtagtcgcggatgaccttccagacctcttcccagtccacttttttggcgtagaccaccagcaacacaatcaccgcgataaaaaacagccaggtgaggatcttctttgctaagcgccagcgcgggtgacttttactcatcagggttttacccccgtgttttcagtttctacccgatcctgcgtttccattgtcggttgtgcgggcggatcaacctgcgccagacgtggcgtgtgtgccggaagccagccaaccagcgccgggaagtggcgtaaaaagtggaacgccagcacgcttttggtcaggttccaccaggtgcgtttgggcagcatggtttcatccacctgctgacaatctgcggcaataatgccgttcagattatcgcgcagcgtctggttaaaatgacgatcgtggatgatgacatttgcttcgagattcagactcaaactgagcggatcgagattactggaccctactgtcgcccagtgatcgtccatcaatgccactttgccgtggagcgggcggcggcggtactcaaaaacctgaacgccgcctttaaccagatagttatacagcaagcgcgcaccgactctgacaatcggcatatccggttcgccctgaatgatcagtttgatccgcaccccgcgccgtgccgctttacgcaaggcgtgtaaaaatcgatagccggggaagaagtaggcgttggcgataatcacttcccgccgcgcctgagtgagcattttcaaataatggcgttcaatatcatcgcgatgttcttcgttatcgcgccagaccagcaatacctgcgcttctcccggctggcggttctcttccgctttgtgatgacgtcgccaccagcgtcgtgccgcgctctgtccaggcaggttttccagctcaaactggagaatatcttcgacaatcggcccttcaaggcgtaccgcgtaatcctgtttagcctctggaccgtagctggacatatgctcggcggagtaattcagcccgccaataaaggctatacgcgcgtcgatcaccacaattttgcgatgcatccggcgaaacacattggtgcgcataccaaaaaggcgagggcggggatcgtagtagcggaacactacgccagctgccgtcagttcattgacaaactcatcgctgagatccgggctaccgtagccatccagcaagacttccgctttaaccccgcgttgcgctgctgccagtagtgccgcatgcagttgtttgccgacgtcatcctcaaaccagataaacgtttcaagaatgatgcgttcttgtgcctcgccaatcgccttaaacaccgcgggataatattgctcgccgttttccagcaactggatcttattgccttcgcgccagctacatttcataaatgaatctccgcacttaaaggggcatgatcagaaaggtgtcgccatgtccgcagcggcaacgcggttggcgcgctggcgctggcatttttgacgtagatcctgtccagtcgtagtagaggaaattgcaccggaaacgtgcgcgccgggcgtccgtgggcgcgggtaaaaatctcatccagtccggcctgcacttttaacggatgattagctttttgccgccagtcattgaaatcacccgccaccaataccggttcgccgtccggtagctcattcacccattcggcgagcatcgcaagctgcgcctgacggtgcgcctcacgcaggcccagatgtacgcacatcacatgaatcgcttttccggtcatcggcggcacaatgcggcagtagagcacgccgcgcttttccgcaccatcgacgctaacatcgcgattctcataatgttcaatgggataacggctcagtacggcgttgccgtgatgcccttccgggtatacggcattgcgaccgtaggcaaaatcgctccacatagtgtcggcgagaaactcgtagtggctggtatcgggccagttttccacatgcagcggatgaacttcgtgcgcgcccatcacttcctgcaggcaaacaatatcggcgctgacggtacgcacggcgtcgcgaagttccggcaaaatgaagcgtcggttaaacgcggtaaagcctttgtgaatattgatggtgagcaccttgaagctaaattgttgtgtttgatcgggcataattttcctgtctttgcctcttatctcattgaaatagtgtagtcggcgtcacaaaaaggtgcggtcttacggaattttccgtaaagttcggtactctgagtaagtagagataaattcttcaggagagaagccatgaagtggcaacaacgtgttcgtgtcgcaacgggtctaagttgctggcagattatgttgcatttactggtagtggcgctgctggtggtgggctggatgagtaagactctggttcacgtcggcgtgggattatgcgcactgtattgtgtcacggtagtgatgatgctggtgtttcagcgccaccccgagcaacgctggcgtgaggtggcagacgtgctggaagagctgaccacgacctggtattttggcgcagcgctgattgtgctgtggctgttgtcccgcgttctggaaaacaactttttgctggcaattgcagggctggcaatccttgccggcccggcggtagtgtctttgctggcgaaagataagaagttacatcaccttacgtctaaacatcgcgtacgccgctgattacatcaccttacgtctaaacatcgcgtacgccgcactccctgtcgtggccgttatcaccagtagcggccacaaactattccacacaatatccagactcgcatccttcaaataaatctgcttggtaatgtccgtaaagtggcgaatagggttaatccacgtcaggttttgcagccataccggcatgttttccaccggagaaacgtaaccggaaaggagaatggcgggcatcataaagacaaacacgccgataaacgcctgctgttgtgtactacagagactactaatcaacagaccgaatcccaccaggcttaaaccataaatcaccatcgtaaagtagaacagcgccaggcttccggcgaaggggatttgatacgcccagataccaatcgccagcacaatggtggcctggaaggtggcgacaattaacgccggtacggctttgccgatgaagatctgccaggtggtgagcgggctaaccagtagctgatcgagcgtaccttgttcacgttcgcgggcgacggaaagactagtgacgatcattacgccgatagtggtgatcatggcgatcagactcggcaccacaaaccatttgtagtcgagattcgggttataccagttgcgtaccaccagctcgctgttgttaggtttcggttttccttccagcagctcctgctgataatttttgacgatctgttgcaggtagttggcggcaatttgcgcactgttggagttacgcccgtcgaggatcaactgcaaaggcgcggtctggaaggtatccagtttgcggctgaagtcagccgggaaacgcaccagtagtaacgccttttgtgtgtcgatggttgggcggatctcctgtgggcttttcagcagcagcacatgagtaaaggcgctggcgcgggcaaaacgttgggtcagctccacgctatgctcgccgttatcttcatcgtagatggcgatggtggcgttagtcacttccagcgtggcggcgaacgggaacaggatcacctgaattagcacgggtaaaatcagaatcgcgcgggtttgcggttcgcgcagcaagctctgcaactctttgcggattaacgtccataagcgatgaaacatgctcttctccttaatccagccgacgtttggttttcagccacgtcaggccgataaacatcaccgcgctagcgatcaaaaacagcacgtttaccaccagcaccactggaatattcccggcgaggaacaggctttgcagggtgctgacgaaataacgagcgggaataatgtacgtcaccgcgcggatcaccgcgggcatactgtcgatctgaaaaataaagccggaaagcataatgctcggcagaaaagcggcgttcagggcgacctgagcggcattgaactggttgcgggtaatcgtggaaatcagcagccccatccccagggtactgagtaaaaacaggctggagataaaaaacagaatcagcaggctcccgcgatacggcacgccgagaataaacacactcaccagcatacacagcaacatcgccagcatcccgagaaagtaataagggatcagcttacacagcagcagttccgtgcgggtaatctccgtagagagcagagcctccatggtgccgcgttcccattctcgcgccaccaccaggctggtgagaatcgcgccgatgaccgtcatgataatggtcaccgcaccggggataatgaagtgctggctaatcgccgccgggttaaaccagtagcgggtttgtacatcaataagcggttcaaaagtctgcccgttgtcctccgctcgctgcatttgccagatctgccagatcccttcgacatacccctgtacaaagttagcggtattcggctcactgccgtcggtgatcacctgaatcggtgcggtggcgttggcgcgctccatctgttccgcaaaatccaccggaataaccaccagaccgcgaattttccccgcctgcattttggcgatcagttcctgacggttatcgctgatggtggcgtcgatgtaggggctaccggtcatggtgtgggtgaaatccagcgccgcttcgctacgctgttccagtaaaatcccgacccgcagcttgctggagtcgaggttaatgccgtaaccaaaaataaacagcagtagcagcgggatcactaccgcaatcagccagctactcggatcgcgaacgatctgccgcgtctctttaacgcacagcgcccgtacgcgacgccaggacaggatcgggttactcattgctatgctccttatcccagtcgtggatcaactgaataaaggcttgctccatggtgggatcgggttgctcatcgttagcgctctgtgctttcaaatcgtccggcgtgccgctggcgattaatttcccgcggtacaccaggccgatgcggtcgcaatattccgcttcatccataaagtgggtggtgaccatcaccgtgacgcctttctctaccatgctgttgatgtgcagccaaaattcacggcgggtgagggggtcaacgccggaagtcggttcgtcgagaaacagaatgtccggttcatgcatcaggctacaggccagcgccagccgctgtttaaaacctaatggcagttcatcggtggcgtgggaggcgatacttttcaggccgaacgcctcgctcatgcgggagattttttcgttctgcgcccgaccgcgtaagccatacacaccagagaaaaagcgtaaattctgttcgaccgtcaggttaccgtagaggctaaatttttgcgccatatagccgagatgctggcgcgctttaccggaactctctttcagatccatccccagcaccagcgcctggccggaagtcggcaccagcaaaccgcacatcatcttaaaggtggtgcttttacccgcgccgtttggccccagcaaaccaaaaatctccccacgtttaacggcaaagttgacgtgatcggtggcggcaaaatccccaaatttcttggtcagttctttcgcttcgatcaccgtctcgccgggtgtgccttctaccgtatgtaatattgcgcccagcgggctttcgctggttccggcaccgcccagcaaatcaataaacgcatcttcaaaacgcggcgtagtttcgttgatgttgatttccggcatcccgtcggcatggcgaatatcgtctggtgtggcctcttttttgaggatcagacgtacgcttttcccctgaatcatgccgtcgctgacctgcggcagtttcaaggcgcgttgcaacagtttgcggttgccctcgtgtggactggtcatcagaaagctgcgtccggccatggtttgtgtcagggcttttggttctccctgatacagcaactcgccttcgttcatcagtaacacgtcacggcactgctcggcttcgtcgagatagctggtactccagaggattaacatcccttcgcccgccagctcatgcaccatctgccacagttcgcgccgactgatagggtcaacgccgacgccgggttcatcgagcagcaacactttcggttcgcccaccagggtacaggccagaccgagtttttgtttcatcccaccggagagcttgcccgccaggcgtccggtaaacggcccaagagacgtaaactccagcaggcgagcaaaagtttgcttacgtgcctcgccggtgacgctgcgcaaatccgcgtacagattgaggttctccatcaccgtgagatcttcatacagaccaaatttctgcggcatataaccgagcacggcgtgcagcgcgccgtcgtttttgatcggatcaaagccaatcaccgtggcactgccgctgtcgggtttcagtaatcccgccaacatccgcatcagcgtggttttacctgcaccgtccggccccaccaaccccgtcacataaccggcgtgaatggtacaatcgagcggcgcgacggcgggcttgtccatgcccggaaagcgtttttccaggccgttcagcgtgataacggcatcattcatgtcctgcctcgtcaccgaattgtaccgtcactggcattccctggcgtaacgcatcatcggcgtcggtcaccacaatacgcaggcgatagacgaggtcggtacgcagatccggcgtttcgacggttttcggggtaaattcagcagtcgggctaacgaaaccaatctgcccgtgatacggcttgtccgggcgaccatcggtataaagcagcactttgcgccccggctgggcctggtcaagattacgttcatcaacataagcgcgcacccacaccggacgcgttagactaacggtaaacaccgtgccaccttcattgaggaccgtgcctggctccaccgcgcgcgttaacagcgtgccatcagacggggctatcaacgtactgtcctgtaaattcaactccgcctgcgccagttgcgcctgcgcctgttcgaggctggctttcgcctgagcgatgtcctgttcacggttaccggaacggtactgacgcaatttatcctgtgcacttttcagcgttgcctgcgcctggtcgcggctggagcgggcattttccaggtcatttgcgctaatagtgcggcttttccacaacccttgctggcggttatagaagttctgcgcatagtcataggcggcttgcgcctgtttcaccgctgcggcggcctgagcgatttcttcattgcgatacccggcaagcatcaggtcatactgcgcctgtgccacgctaacacccgctttcgcctgcatcagggcaatctcatacggcttgtgatccagttcgcccagcacctggcccgctttgatagcatcaccttcgtccaccgccaggctttcaacgcgccccccaacacggaaactaagatttaccgtacgaatatccacgttgccatacagcgtcaggccgttatcctggcggctttgataccaccagtagcctccggcaaccacggcggcaagtaccactaccgccaatccgatcacgacaggttttttcatcactacaaactcctttgcgataattacaaactcctttggcttaatccttgcaaaatcaggtcgatatgacaggtcaccgtctggttgatcagttcggtcttttcttcatcgaacgcggtccagccggtacgtaacagaattgtttctttgccaagacggaacgccagaatctcaccaatcaacgcatgggtatgaaggatcatgcgggtgtcattggcgtcgcagccggtccaggcggcaatcaggcgtgtcaggtggctgtgtagcggactaatcacctgttcgtgcaccaggtggtaggctgccgtgggagagagctgctcacgggagataaacttgctgaggttgacggtgtcatcctgggtgagcagcttaatcatgttcctgcaggcgcgaaggatcagttcacggatggcagcccgatcaggctgtggttgcgcgaacaagcgttcggcttcctcggcatgcggacggaactgctcgccaataaaatcggcaatccactgggcgcaggcgaggtacaaatcttctttgctaccgaagtagtaggtgatggcagcgatattctgcccggcctgggcggctatctcgcgagtggtggcgttcattccatattcaccaaactgcgccagtgcggcagcaatcagctgttttttcgcctgttcacccttgattgtcatggcaggattattcatcgcacagtccattcttaatcaaatgattgattaagattatgactccataggggagttgtccagtatggctaagaattttagcaacgccagtcacagggataatttatgcgctgcgtcacaaaaactgctacactccgctccctcatgacattgtggtttttgtcattttccttttcagtatctccctgaaaactacaccggtaacggtcggggcggttcggagtagttatgtctttcgattctttgggtttaagccctgatatcctgcgcgccgttgccgagcagggttaccgtgaacccacccctattcagcagcaggcgatccctgcggtgctggaaggccgcgacctgatggctagcgcccagaccggcaccggcaaaacagcgggctttacgctgccgctgttgcaacacctgatcactcgccagccgcacgccaaagggcgtcgtccggtacgtgcgctcattcttaccccgacccgtgaactggcggcgcagattggcgaaaacgtccgtgattacagcaaatacctgaacattcgtagcctggtggtgtttggtggtgtgagtattaacccgcagatgatgaaactgcgtggcggcgttgatgtgctggtggcaaccccgggacgtttgctggacctggaacatcagaatgcagtgaagctggatcaggttgaaatcctcgtcctcgatgaagctgaccgcatgctcgacatgggctttatccacgatatccgtcgcgtgttaacaaaactacctgcgaagcgccagaacctgttattctccgcgaccttctctgacgatattaaagccctggcggaaaaactgttgcacaacccgctggaaatcgaagtggcacgccgcaataccgcgtctgatcaggtgacccagcacgttcactttgtcgataagaaacgcaaacgcgaattgctgagccacatgattgggaaagggaactggcagcaggtgctggtgtttacccgtaccaaacacggcgctaaccatctggctgaacagctcaataaagatggcatccgtagtgcggcgatccacggcaataaaagccaaggtgcgcgtactcgtgcgctggctgattttaaaagcggcgatattcgtgtactggtggcaactgacatcgctgcgcgcggcctggatattgaagagctgccgcacgtcgtcaactatgaactgccaaacgtacctgaagattatgtccaccgtatcgggcgtaccggtcgtgcggctgctaccggtgaagcgttgagcctggtgtgtgttgatgaacacaaactgctgcgtgatatcgaaaaactgctgaaaaaagagatcccgcgcattgcgattccgggctatgagccggacccgagtatcaaagccgaaccgatccagaacggtcgccagcaacgtggcggcggcggtcgtgggcaaggtggtggtcgcggtcaacagcaaccacgccgtggggaaggtggcgcaaaatctgcaagcgcgaaacctgcagaaaaaccgtctcgccgcctcggcgatgccaaaccggcaggcgaacaacaacgtcgccgccgtccgcgtaaacctgccgctgcgcagtaatcttttatgccgggctatgcccggcatcaggctgatgaacaaacgcaaaactgcctgatgcgctacgcttatcaggcctacgtgaactctgcaatatattgaatttgcatgcttttgtaggccggataaggcgtttacgccgcatccggcatttcacaacaagcacttgtcagcaatttgagaacacgggaaaaaatttatctgttttaccgcccataagccaccgagacgttacttctctatagccaattgttcgcgcaactccattaaaaggtagcccagtcgattcttgcccttaccatgaccaccgtctccccagtaagcatcgttttccgtatgctcaaccagttttgcgggcgcggttgccagcaagagcgcacgcagttctgcatgctgttcgaatttagcgcgaagtgcttttcgcatcacctgttctttgacgctctcccagtttttacgcagaggcttagaacgatcgcgccccatgcgtgcggcgaccataggggaagaaacccgacggatctcttcgcggtatttttcatcaaggaatttttgtgcctgaaaatagtgttcactggtaggccaggttttcccgtcaaccttgatgggccaggcggcaaagttagaaaaatcaccgtagtcatcgctggtgctgtagaaatttatgatggtgtcttgcatgacgtgttggatcctttgtgctcgaacgggcattaaaccgcattatgttggtggttattgcgagccgctttccagaaacagaaaaaccattacccctgaaaaccgaaaaatgccacaatattggctgtttatacagtatttcaggttttctcatggcattaaccgccgcgcttaaagcgcaaattgccgcctggtataaggcgcttcaggaacagatccccgactttattccccgtgcgccgcagcggcagatgattgcggacgtcgccaaaacgctggccggagaagaagggcgacatctggcgattgaagcccccaccggcgttgggaaaacgctctcttatttgattcccggcatcgccattgcccgcgaagagcaaaaaacgctggtggtgagtaccgccaacgtggcattgcaggatcagatttacagcaaagatttaccgctgctgaaaaagatcattcccgatcttaaattcactgccgcttttgggcgtgggcgctacgtttgtccgcgtaatctgacggcgctcgccagtactgaacccacgcaacaggatctgctggcgtttcttgacgacgaactgacgccgaacaatcaggaagagcaaaaacgttgtgcgaagctgaagggcgatctcgatacttataaatgggatggtctgcgcgatcatactgatatcgctatagatgacgatctctggcgtcgtttaagtaccgacaaagccagctgcctcaaccgcaattgttactactatcgtgaatgcccgttttttgtcgctcgtcgggagattcaggaagcggaagtggtggtggcaaaccatgcgctggtgatggcggcgatggaaagcgaagcggtattgcctgacccgaaaaatttactgctggtgctggacgaaggccatcacctgccggatgtggcgcgggatgcgcttgagatgagcgccgaaatcaccgcgccgtggtatcggctacagctggacttgttcacgaaactggtcgctacctgcatggagcagtttcgcccgaagaccatcccaccgctggcgatccctgaacgtttgaatgcgcattgtgaagagttgtatgagcttatcgccagcttaaacaacattctcaatctctacatgcctgccgggcaggaggcagagcaccgttttgcgatgggcgaactgccagatgaagtgctggagatctgccagcggctggcaaaactcaccgagatgctgcgtggcctggcggagttatttcttaacgatttaagtgagaaaaccggcagccatgacattgtacgtctgcatcggttgattttgcagatgaaccgcgcgttggggatgttcgaggcgcaaagcaaactctggcggctggctagcctggcgcaatcttccggtgcaccggtgaccaaatgggcgacgcgggaagagcgcgaagggcagctacacctctggtttcactgcgtgggaatacgtgtcagcgatcagctggaaaggctgctgtggcgcagtattccgcacattattgtcacctccgcaaccttgcgtagcctgaacagttttagccgtttgcaggagatgagtggtctgaaagagaaagcgggcgaccgttttgtggcgctggattccccctttaaccactgcgaacagggcaaaattgttattccccggatgcgcgttgagccttccatcgacaacgaagagcagcatattgccgaaatggcggcctttttccgtaagcaggtggagagcaaaaaacatctcggtatgttggtactgtttgccagcggacgggcgatgcagcgctttctcgactatgtgacggatttacgtctgatgttgctggttcagggcgatcagccgcgttaccgtttagttgaactgcaccgcaaacgcgtcgccaacggtgagcgcagcgtgctggtgggcttacagagttttgccgaagggcttgatttgaaaggtgatctgctcagccaggtgcatatccacaaaatcgcttttccgcccatcgacagcccggtggtgatcaccgaaggggaatggctgaaaagcctcaaccgctatccgtttgaggtgcaaagcctgccgagcgccagctttaacctgattcagcaggttgggcgactgattcgaagccacggttgctggggcgaagtggttatctacgacaaacgcttgctgaccaaaaattatggcaagcgactactggatgcattaccggtatttccgatagagcaaccggaagtccctgaaggtatagttaaaaagaaagaaaaaacgaaatccccacgccgtcggcggcgttaatgatgtgagtcaggtaaggagtcgtaaatggactatcgcaaaatcattaaagagatcgggcgcgggaaaaaccacgcgcgcgatttagaccgggatactgcgcgcggtctgtatgctcatatgctcaatggtgaagtccctgaccttgagttgggcggcgtattgattgcgctgcgtatcaaaggagaaggggaagcagagatgctcggcttttacgaagccatgcaaaatcacaccatcaagctgacgccgccagcaggcaagccgatgccgattgtcatccccagttacaacggcgcgcgtaaacaggccaacctgacgccgttgttggcgattctcctgcacaaactcggttttcctgtggtggttcacggggttagcgaagatccaacccgcgtgctgactgaaaccatttttgaattgatgggtattacgccaacgttgcacggcgggcaggcgcaggcgaagctcgacgaacatcaaccggtgtttatgccagtcggcgcgttttgcccgccgctggaaaaacaactggcgatgcgctggcggatgggcgtgcgtaacagtgcacataccctggcgaaactggcgacgccatttgccgaaggtgaggcgctgcgtctttccagcgttagccatccggaatacattggacgcgtcgcgaagttctttagcgatatcggcgggcgggcgctactaatgcatggtactgaaggtgaagtgtatgctaatccgcagcgctgcccgcagatcaatctcattgaccgtgaagggatgcgggtgctgtatgaaaaacaggacactgctggtagcgagttactgccacaagcaaaagatccggaaaccacggcgcagtggattgagcgttgccttgctggcagcgaaccgattcccgaaagcctgaaaatccagatggcttgctgcctggtggctacgggtgaagcggcaactatcagcgacggcctggcgcgcgttaatcaggcattttaattcttttctcagccggatgagccatgtcatccggcttttaccccaccgcaatatgaaattcctgcatctttattgaccttcccacgcccggcgtgcagcataaaaatacaacaaacacataacataaacaggagttaaccatggaaagtggtcatcgctttgatgctcagacgctgcacagttttattcaggctgtatttcgtcagatgggtagcgaggaacaagaagcgaaattagttgccgatcatttaatcgcggcaaacctggcagggcatgatagtcatggtattggcatgatcccaagctatgtacgctcctggagtcaggggcacctgcaaattaaccatcatgccaaaaccgttaaagaggcgggggcggcggtcacgctcgatggcgatcgcgcatttggtcaggtcgcggcacatgaagcgatggcgctggggattgagaaagcgcatcagcacggtattgccgccgtggcgctacataacagccatcatatcggccgtatcggttactgggcggagcagtgtgcagcggcggggtttgtctctatccactttgttagcgtggtcggtattccaatggtcgcgccgttccacggtcgcgacagccgctttggcaccaatccgttctgtgtggttttccctcgtaaagataatttcccgctgttgcttgattacgccaccagcgccattgcatttggcaaaacccgcgtcgcctggcataaaggcgtccccgtgccgccaggttgcctgattgacgttaacggcgtgccgacgaccaatccggcggtaatgcaggagagcccgttgggtagcctgttgacctttgccgaacataaaggctacgcccttgcagcgatgtgtgaaattcttggcggggcgctttccggcggtaaaacgacgcatcaggaaacgttacaaaccagtcccgatgccattcttaactgcatgaccactatcatcatcaacccggaactcttcggcgcgccggattgtaacgcgcagaccgaagcctttgccgagtgggtgaaagccagcccgcatgatgatgataagccgattttgctaccgggcgagtgggaagtgaacacgcgtcgcgaacggcagaagcaggggattccactggatgcgggaagctggcaggccatttgtgatgcagcgcggcagattggtatgccggaagagacgttgcaggctttctgtcagcagttagccagctaaaaaaaaagcccgtccagtggcggacgggcaaacaagggtaacataggatcaatgagggttagagcatatgcgtctgtcggcaaacagacagggaaatacttgtgctggacgtagcgtaaacgcctgatccgtccaacggttcggattttgtaggcctgataagacgcggtagcgtcgcatcaggcatctgttgccggatgcggcgtaaacgccttatccgtcctacgaattacttataaattaccgcagtaccgcttaatttattgttgttggtggcggaagtgatgctgtatccactggcaccggctgccgcggctttctcagccagtttcgcttccagggcatcgagggtggatgcgccatcggcagaaaccacgccgattttattcatgttctgtgcctgggatgccgttaccggttccgccgcgaacacgccaaaactcagagtactaagagccatagcagcaacaacagtattgatagttttcataattaatctctcgcaggtgatttttgtataagtgacgttgtttcgtcgatgtgatgagtatcacgtttttttacgagagataaaatcgaagagaattgaccgccttgttcaaataaattgattgatatctaacctactgataaaccatttatttgttgtacttatgaacttgttttataccgcgtggcagtcacagcagcgttaaaggcacggaatgacacgcaaaatacaaattatactcgctatgcatctcgccagttgtagttaacgtaactggctgtctttgctacctctgcgattatatcctgtataagctggtttttgtaaatctttctcctgctgacaatgaatacataagcgcacgccaggaatggcttcccgacgggcctgcgggatgggggcaccgcactcttcacattcatccaggctttcgccgcgcggaatttcaccccgagcgcgggcaatcgcatcttcaattgtactgttgatctgttcgttgacggcgtcatcgttagcccaaccggatgccatatcgacctccccatatcaatacttgtacagttaagtgtagctaatccagggacgaactcgggcagttcaagcatcagatctcgctccattcccgcagcagattatgataaagattaagcaggctcaggatctcttcactttcgccgtagcggcttttcaggctctgaatattgttgtccagttcaaacagcatggcgcgctttttatcatcgcggatcatgctctggatccacataaaacttgccactcgtacgccgcgggttacgggtgtcacgcaatgcaggctgctggagggatacaacacgagatcgcctgccgggagttttacccgatgttgtccgaaggtgtcattaacgaccagttcgccgccgtcgtagctttgtggatcgcttaaaaacagcgtggcagaaaggtcagtacgcatccagccgttttgtggatggctgcgtactgcgccatccacatggaaaccataggtttcattgttctgatagcgattaaacagcggcgtggaaagggtacgcggcaaggccgcggcaaagaataaagcatgttggttaaccgcgttcagcacctcattttgcagggcggcgtataacgtgctgcgggtgtcgacctgttgattgttcttaacttgcgcaccttgtgcgccggtggtgacgcgtccatccacccattcggcttgttccagttgttcgcgaaaacgagcgacgtcctgtgggcttaacacgccgggaatgtggtacatcatacaatttctccaaaaagtggggcctgcgccccacatctgaatcagaaatgcatattggctgtgagcaagaaggttcttggctcgcccgggtgataacggtagccgctcttgttgatactggcgacgtaatcggtatcaaacaggttgtaaacgtttagctggaagtcgagattgcgattaactcgataccccagtttggcatcggcgacccagtaaccttcggtaaacgctggcgttcccaccgcgccgtcactacctttatgcatactgccgatatagcgtgcgcccgcgccaacagagatatcgtcggttgcctgatattggctccataaggtgaaggcgtgctccggggtatacggcaggctactggaaccatcctgggcaacatctttgccgtttttgatggttgctttttgctgggtatagccgccaatcacctgccacgcgggagtgatattcccggccacggatatctcatagccttcgacgcgtttcttaccgtattggctgtaagttccgtcatcattttgctcaacttcattttcgatatcagtgcggaacagcgcggcggtgagcaacagacgtttatccagaacctgccatttggtgccaatctcgctggtgttggctttttgcggtttaaaatcggtgcggttggcactgttaccgctgccagactgcgcaagggcgaagttgttgccgcccggaggctgctgggaaacggcatagttaatatagacattgccgttttccgtcaggtgatacagcgccccggctttccagttcatcagattgccgctcttggcggtgtcgacggtggtgaccggagaaccttttgccacaccagttgggcaggtgatggcaccgcgtccgctgccgccgcaggcggtggcactgtcatattcagtatgataattatccagacggatcccgccgttcagctcaaaatcacgggtgatttgcagcgtatcaaaggcgtaaattgcgaaggtatccgtctgaccattggcgtttgcgccgttgcgcgtcaggccgccgggatgaatgctgctgtcaggatgataaatatttaccgcgggtaacgtcaccggattaacgccgtagttagtctgcgtttcacgggtaaattccacgccggtactgacatcatgaccgatagaaccggtatagaacgtgctggtcaggttggtctggttggtgagaattttattactcacatctttggtattcgccgtgcgactccaggtccagctattcacatcgctggtgggctgagtaatattgctcgccccgcccataatcgccgtcatcaggtaatcctgctttacgcggctccaacgggtagtattgcgaatggtggtgttatcgttgatgtcgtgctcaaaacgcatggtggcggtgtcggtggtgctatcgtcgtaatcggaatccgtgccgtaaaagttatgagtatcaacttttccggaatgattcagggccgccgttcccgcagatggggcagaatagcccggcaaaccgatggtcggaatgccgccgtctggcgtgttgtgctgggtgacatgcagataattaagatacaaacgattcgctgtaccaaggccaaaagcgacagaaggggcgacgccgtaacgctcatttttgactttgtcgcgtccggcatcgtgcgttttttcgcccattacattcaggcgcaccgcggtggtatcaccaatgacctgattgacgtccagcgtgccgcggcggaaccaggcgctgccaatactggcggaggcgtcaatgccggaatcattgcgcggctgcttgctgatcatattgatgctgcctgtcggtgcgctgcgcccgtagtcggtgccggacggccctttaatcacttcgacctgctcggtattgaaggtgtcgcggctgacgctgccgatatcgcgaatgccatcaatataaatactgttagaggtatcggcaccacgcatataaatggcgtcgccagtggtggagttaccgttctcacccgcaaaaaacgcacccacgccggggacgtttttgagcgcgtcggtaaggttggttgcgccctgatctttaatcacttgttcagaaattaccgtcatcgtgcgggtagtatccgctaccggacggctgaatttcggatcggcagattgttgtggcgcataaaggctaggcgtacttgcttcgacaaccagcgtgtcatccgcgttagtttgcccttcggcggcgagtgcctgagccacaggcgtgatgccaatacaaagaccggcaaagaacgtgaggctatgaaattgtctggcagggaaattgcgattgttttccattttgcaggtgactttttcttatatgttgaaattttcactgccacgagaaagcctctctgcggatgcgatgccactgttaatcccgtgatagtgctcgtgaaagtgataataattttgataagcattatcacttggagcgattttctatcacccattgcgcgaaaaagaaatacatttatttacattgagttcatatttgatgttttttgattacaaaacagacgaaaactgcatccagaggcgaatgcagttacgttggtggggttatttgtagatggttgcagtaccgaacatctggtcatttccgcctgcggaattaatgacataacctttcgcgccttgttcgcgcgctttttctgccagtttatcctccagatcgcttaggttacttgcgccagttgcgctaacggtaccggcgggccgtagctgaccgctgtccaggttactcatcggttgcgcggcataagccgtgagagagattccgctcaggacggtggcaatcagtagtgtgaggcactttttcataatgacatcctcataaatacaacgggtagtgcctgataagtgtaggtcgcctgcgcgatgcaaatgacgcaaaaaattgacagagatgtgcttattttttgaacgatatatttttacaaaataagacaaatcaatgacatgcataatgctgatttttatgatgaattgccataaaccatagccatgttaaggttttggggaatgataaacgcagccagatatttaccctgtcgcgttatgcgggtatcttacgccgctgcttaaaggagaatgctatgtccgcccagaaaccggggttgcatccgcgcaaccgtcatcacagccgctacgatctcgccacgctttgtcaggtcaatcctgaactcaggcaattcctcacgcttacacccgccggggagcaaagcgtagactttgccaatccgctggcggtgaaggcgctcaataaggcgttgctggcccatttttacgccgtagcgaactgggatatccccgacggttttctctgcccaccagtaccgggccgggcggattatattcatcaccttgccgatttactggcagaagcaagcggaacaattccagcgaatgccagcattctggatatcggcgttggtgcgaactgtatttatccgctgattggcgtacatgaatatggctggcgttttaccggtagtgaaaccagcagccaggcgttaagcagtgcgcaggcgattatcagttctaatccggggcttaaccgcgccattcgtctgcgtcggcaaaaagagagtggggcgatttttaacggcatcatccataaaaacgagcaatacgacgcgaccttgtgtaacccgccattccacgattccgccgctgcggcacgggcaggtagtgagcgtaaacgccgtaacctggggctgaacaaagacgatgcactgaactttggcggccagcaacaggagttgtggtgtgaaggcggtgaagtcacctttatcaaaaagatgattgaagagagcaaaggcttcgcgaagcaggtgatgtggtttacaagtctggtatctcgtggtgaaaacttaccgccgttgtatcgtgccctgacggacgtgggcgcggtgaaggtggttaaaaaagagatggcccaggggcaaaagcagagtcgctttattgcctggacctttatgaacgacgagcagcgccgccgttttgtcaatcgccagcgttaaagcgttggttcccccggcggtaacggttcagccggggtcgcgcccggagcaggcagcacctgataagtctgcactggcgcgcgaacgcccgccaggtcgaaatgttttttcacctggctgtcgagggcaaagcgtaccgtccactgtttgagtggcagcgtggtgaagctaacacgcagtgtaaacgcggtattgcttaagccgacaatcccggcaaaattcggttcaccaataatcagcccgcgaatttcttcgttttccattaattccgctaccgcatctttcagtgcctgattggctttatcagcatcttcatggcgatcaacatcataatttgccaccacgctaccaatgccgcggacaaagttagcaaaggtggttatgctagaccacggaatgatgtgatacgccccggtatcctgtcgtacgcccacggagcgaatgctcatccgttccactgtgccggtcaacggcccgatagtcaccaaatctccagtgttcatgccgttttcaaactgaataaataccccggtgataatatctttcaccagcgtttggctaccaaagctgatagccagacctaatgccccggcacctgccagcaatggcgcgatattgacgccgatttcgctcaacacaatcatgatggtgatggtactgataatcaccgccagcgcgttacgaaacagcgtaagcagggtacgcgtgcgggcgctgggtagcgggcggccatgaatatcgctagccagccggttttcgatcaaactggcgagcaccgtccagccaaccgcgctgaagaaaagaatgagtgcgatacggatcaggatatctacggttttctgccccgcgccgttttgcagccagttccagaaatcgaacaatccccatgcgctcaacagcaacattaccgccacgcagactgtcagaatacgcgccgttttcagcgccgcgctcagccagccattcaaccgtttttgcagctccggatagttacgctgagtatgtgggctgagagtgatggttttcgccagccagcgggaaaacataccggaaacaaacgctgcgataccaataatcgccaggctgcgcaccgttgcacccatcataaatttcaggctgttgcccggatcgaacaagctaaagaaaaacagcacgataaaataggcgcttgccagccagtgccacaccagcgcaaaggcgcggataaacaggctgaaaaaggccaggctatgctccgcgaagttgagcaaatgctgggtaatctcttttttattacgaaagatcaggtacaacgcccagacggtcatgcacagcataatgatgacgttcgccagcgcacctatctgtacattcacctgattagagataatcggcacggccacaatcaggccataacctatcaaactgcttaaccagctcaggcgacgactccagtaacgggcgctctcgtcctgaatcgtgaacgggcgcagctccgccacgtttgggcaaaaaatcaggcgtagtacggctttgaaaaattcaatgagggcaaaggcgttgagaaacaaactttgttggaaagcgatggtgcgactgcctgcattcaggttgtcgcttaatacctggccgacaaataatgtcagggccagtaacagcaggtcgataataaacgccccgataatcatcgccggaagctgcaaccagttactgcgctcacgatttttttgccgcgcccactgacccattttgcgatacagcggcagtgcgcacaggcgaatcagccagtaaaaaccaaacactaataccgctaacatactaaaatgggtcagcgcattgctgaaggtttgtggattaaacggcttatgcggggagccggtgatattgcgataaagttgcccgaagcgggcggaaagggcttcaccataatggcggctgacttcggtgaccttttgcagcacggtttgctcttcgaccagcgtcggcggcactatttttggtaccggttcagcagggggcgtagcggcaacggtgcgcaactggtcgatcaactctttacggctggtgtcattatccagcacatccgccagtgcgccataggccgcttttttttgttcgatatccggttccggggccggttcagtcgtactgtccgttgtcgttgtggttgtaacgccgggtatggataccgcgtgggcaggtgcgcccagcaggcagaagaggatgaacaggatccaccgcatgactcctccagtgagaaaatagagcaaaaagataagtatagatgctggaggaggggcgattttaaatgagaggaatctggtgtgcctccctttcgggtgaaagggaggaagggatattaagcaggttgctgacaacgtgcgggcttttttgccggatgcggcgtgaacgccttatccgtcctacaagttcatgcaattttaataagttgccagatatcctgtaggcctgataagcgtagcgcatcaggcaatgtgtcttattaagagacgtgctgcaaaaattcctgcaagcgctggctcggcgggttcttgatcaacacctgcggattgccatcttccgcaatccggcctttgtcgataaagatcagccggctagctactttctcggcaaaaccgatttcgtgggtcacgatcaccatcgtcatcccttcttcagccagatcctgcataaccttcagcacttcatggcgcagttccgggtcaagagcggaagtcggttcatcaaacagcatcattttcggcttcaccgccagcgcgcgggcaatcgccacacgctgctgttgaccaccagaaagttcggaagggtagtgatgtgcacgttctgccagaccgactttcgccagcagctcacgtgccagtttttccgcctcttctttgttcgcgccacgcacgcgtagcgggccaaacatgacgttttccagcgctgtcagatgcgggaagaggtaaaactgctggaacaccatacctgcttcctggcgaatcaggcgctcgtcaactttcggatcgttaaccttcaggccatcgacaatcagatcgccggaggtgatttcttccagtttgttgatgcagcgcagcagggtgcttttaccggaaccggacggcccgataatcaccacgacttcgccctgggcaatgttcaaatcgatattgtgcagcacctgggttgggccaaagtgcttggagacgtttttaaattcaatcacaggattttcatccttctttccagacgacgcagaataaagctcagcaccagggtaataatcagatagaacaccgccacggcgctccagatctcaagggcgcggaagttaccggcaataatttcttgcccctgacgggtcagttccgccacgccgatcacaataaacaggctggtgtctttaatgctgatgatccactggttacccagcggcggcagcatacgacgcagtgccagcggtaaaatgacgtagcgaatggtttcccaacgactaagaccgagcgccagtcctgcttcacgaaaacctttgtggatagacagcaccgcaccacgcgtgatttccgcaatatacgcgccggagttgatcatgatggtgaccaccgccgcagtaaatgggtcgatgcgtaagtcgttaaacgccatcggcagggcgaaataaataaacatcacctggacgacgataggtgtgccgcggatcacttcaataaagaccagcgcgacgtggttggctatccaacctccgaaggtgcgtgcaaaacctgccagcaatccgattaccagaccgcctgccagaccgaggacgctaatccacagggtcattttggcaccttcaatcagaagcggaatggcaggccagatggcactccagtcaaactgcatatgttgttcctgttaccgtggtgtaaataatcaaattcagggtaattaatggccccggagcgggtttgcgcccctcaccctaatcctctccccataggggagagggaactgccagtgcgttttacaggtgtagcgttattatttcggttcagtaccgaaccattttttgtagatttcgttgtaagttccgttctcgcgcagggttttcaacgcgccgttgactttgtcacgcagctcgtcgctacctttcgggaacgcaataccgtattgctgcgcttccagagagtcacctaccgctttgaactgaccgttaccggcggttttgatgaagtacagaatgtttggcgtatcgtgcagaacggcgtctgcgcggttggtgcccagttccatataggcgttatcgatgttcgggaactgacgcagatctttagttttgatgtttgctttcgcgtaatcaacggagccagtaccgctcttcacagcaaccactttcccgtcgagatctttcacgcttttcacatcgttattgttagctttcaccatcactaacaggccgcttttgtagtagccgtcagagaaatcgatcgcttttttacgctcgtcggtgatggtaatgcccgccagcgccagatcgacgtttttggtttgcagtgccggaatgatcccactgaaatccatcggcttcagttcgtaatccagcttcagctctttagcgatggcagcccacagatcaacgtcaaagcccacatatttatcgccctgtttaaattcaaacggaacgaaggcggtatccgtcgcgacaactaattttttatccgcggcatgagaagaaaccgcaaaagccagggtcagtgcagccagactaacttttaatacagacttcatagcatttccttttttctatccacgggacgatcccctgcgtgacattcacatatatgaaaaaatcgtgccagttttgcaactccttgatttttcgagatgcggcaaaaacgtgatgcacgatttatagggcaataccctgaagatgcaccattctggggcaccaatctggtgcgctaaaattgtgcactcaacacagtgattatttagcgtaaaacctgatgaaaaaacaatctttatgtaacgattgtgtgatgatgtggatacaaaaaatttacttaatcagctggagatagcagatggatgcactaaataagtgcgttgaggtgggctgcaaaacaaaacggcctcctgtcaggaagccgcttttatcgggtactaaagttctgcaccatcagcgatggatttattcgatgttagactcgataaaccacaggaatttatccaggtcgcgagacgcggcggtcaggatatctgcggtgtcgtcatctttcgcttcgccaatcgctttgcgtacgtcattagcgacgattgcgtaacggtcagccagttctttcaggtgatcctgaacgttgtggatgtccagcgggtaacttttcagcggggttttgctgttgataacttgagtggtccccagagctacaccgcccagctgcactgcacgttctgccatggtatccagatgatcgatcagtgcggtgcggaagccatccagcatttcatgtacggcaatgaagttagcgccgcgcatgttccagtgcgcttgtttggtaatcaaagaaagatcaataaactggataacctggcgattcagcaactctactgttgcttttttctcgctgtcggagacatcgttgcgggtataaagcagattggtcgctttacttttaactaatttagcggtactcataatttcatatcctcttgatgttatgtcccagtaattaacgagattaagtatagcaccggctatgtgttccgctattctggctgttcctatcacactaatagtggtaacaagcgtgaaaaacaaaactaataaagattcaatgagttagatatattgataagaacaattcttatttatctgctcgccaggaattttcggaataaatatgcttttgcataattcgatatataaagacggtgtagaggaaaagtagcgagaaattctgcatggttatgcataaccatgcagaaatgtaaatttaattaatgtctaattcttttattttgctctctttgcgtactgtcagcgtagaccccatactagcggcgatgatagcgccgagcgccagtagctgtatgggtgtcagtgtttctccgaggaaaatcatcccggaaacggcagccagcgccggttccatgctcatcagcgtaccaaatgtccgtgttggcaaacgggtgagggcaatcatttccaggctataaggcagagcggtgctgagaatagcgacagccagacccaatggaataacgctccagtgccagagtgcttcaccagcctgaagcgctccaattggcacgaaaattaacgctgcaatcaagctaccaattgccaccgtcgcagggccatgttccgctcctgcgcgttgcccacttaaaatgtaaatagcccaacaagccccggcccccagtgccagcgcacagccggttaaatcgacatgggaaacgtcttgccccagcggtagcaggaaccacagaccaagaaccgccagcacaacccagacgaaatctaccgggcgacgagaagagaacagcgccaccgccagtggtccggtgaactccagcgccaccgcaatacccagcggtactgtctgaatagaaagataaaaaagataattcatcccacccaggctaacgccgtaaaacaacagcggtaaccgttgctctttggcaaagcgcagtcgccatggcttaaagaacgcgatgaggatcagcgttcctaatgccagacgcagcgcagtgacacccggtgcgcccaccagaggaaaaagactcttagctaagctggctccaccctgaatagacgccatggcaacgagcaatatgactattggtaaccagaccggcattttacgtaaactaccaggcatcctttctcccacaaatatctagacttaagtaaagcgtggagtgtactggatatacccaatgctggttgagcatttgttgaaaaaattttcccccgttttgactaaaatgcgccaggattgatggaatcattagtctggtgattaggaataatctggatgaatgacagggaaaacatgcgtaatacttacgcagttctctgaaaaagtgatttaaatttagatggatagcggtgtatggaaacgttctgttacatgaaatggcccgttagacatcacaaatcgcgaagagtttcccattaatttttgatatatttaaaacttaggacttatttgaatcacatttgaggtggttatgaaaaaaattgcatgtcttagtgcactggccgcagttctggctttcaccgcaggtacttccgtagctgcgacttctactgtaactggcggttacgcacagagcgacgctcagggccaaatgaacaaaatgggcggtttcaacctgaaataccgctatgaagaagacaacagcccgctgggtgtgatcggttctttcacttacaccgagaaaagccgtactgcaagctctggtgactacaacaaaaaccagtactacggcatcactgctggtccggcttaccgcattaacgactgggcaagcatctacggtgtagtgggtgtgggttatggtaaattccagaccactgaatacccgacctacaaacacgacaccagcgactacggtttctcctacggtgcgggtctgcagttcaacccgatggaaaacgttgctctggacttctcttacgagcagagccgtattcgtagcgttgacgtaggcacctggattgccggtgttggttaccgcttctaatcactttggtgatataaaaaatccgcctctcggggcggatttttgtttttaaggtttcgggtcgaaaatatcggttccgagatggttgtaatccaccttctgtaactggaagttggtgatgtatatcggcccggctttcttctcagatataaacgggtatttgatgttaatttccttcgctttaatccccgtccactgggagaaaaagcctaagaagtcattggcactgcggcgggctttaatcacacgatgcgctttatcgtcgctggaaatgaccataaaaggcacctggaaattttgctgatatttatcatcatgggcaaggtattgcacgtctttaccgcgctctttaaaggccagaccgtggtcagaaaagtaaaccaggctgaagctgctgccgctgttgcgtaactgatcgtacagcttgcgcagtaaatcgtccgtttgcgtcatggtatagagatagcagctcgtttctttgctttgcacaaaggtttcgtattttccttgtgtcctgtcgcaggcctgcggatgactgcccatcagatgtagaacaatcagctgcggttggctgtgctcttgcgccagcacttgagcggtcatatccagtaacgcttcgtctttggtgtttttatctgcttcaaaattaccttctttcaggaagtacacttcatctgctcgtttggcgatgctggcgatagcggtatcgtattcgccgatttgaccctggttggaaaaccaccaggtctggaagcccgcgcgatttgccagggtgacaaagttatcctgaaactgtggtttgccatcgacaacgcgattgagcgttaagccaaggcttttctgcgtggagccactggcggcaatgtagtcagcaaatatcaaaccgttaacgctgctggcaaacggggtattgtcccagtgaccgccaaaggcaccgagggcatcgcgacgcgcgctttcaccgatcaccaccacataggtctgatacttcggcttaacggcagtgaccgtccaggtatctttcattccggaaagttttgccatccgttcttgctcttcaatcacctcgttattattgacgatgacatccttagcaaaacgaaataccggatagccagtatctttcagtttaaatacgccaccccaggccaggttttgcacgggagcaacaaaaaatgtcgccacactgaataccagacacaggctgtcgaaggtattccagcgcgctttttcattctctttttttcgcctgattgctattacgccgagcgcaaaaataaataagccgaccaggtagctgtaccacggaaaaatcgtcaggatttcggtgctctcttccatattggtggagtgcaatgccagcaatgtattgaaattaggcgcgccgtaggcctgagcaaaagggaaataacaagccgccaccaggctactgacaccgaccagaactttttgtacgcgaggcaatgttcgccatagcaaaagcaaaatagccgtaaacgcagcggtgtagagcaaactgaaggggtaacctaagccgaggttaattaataggctctgtaaaaagtagaacgcagtccacgggctaaatacccggctacgggtaacaaggctttctttgagggttaaattcatatgccactatcgtaacaaacgccatgtgcttaccctggcgtcaagggtcaatacctgcaagagtgcgtgaagagtggaaaggggtccgcatccgcgagccgcaatatacgcagggctgcaagaagatagagcgagccgccgtagtggtcaactactgacgaacaaatcttttgcgaaggggattgcaaatccgacaaaaagtggggtttttcagaccaaaacgcgttatgcctgcatgaaagcaggagtgaagcggcgtaccgcgacgccgctatttatcggaaggtttatcttgctgcggtttgttgttgaccatatcgcacaacatagagagcagcattaaccgtactttaaagggagaatgactaaacacgcgcatacacctcttgaactcattcataagacctcctgacttgctaatcccgtcgatccttgaggggtgattgcattacatacagatatagcacaggctatattatatagctattgctaaaacgttaattttttgtaccttcgcaactctggtttacaatgtgcgcacgaaatgagaacgctatgtatgcgtcaccataatgaggaagcacaatgagtcgtcgcgcaggtacgccaacagcaaaaaaagtgacgcagttagtgaacgtggaagagcacgttgaagggttccgccaggtcagagaggcgcatcggcgcgagcttattgatgattacgttgagctgatttctgacttgatcagggaagtgggggaagctcgtcaggtggacatggctgctcgtctgggagttagccaaccgacggtggctaaaatgcttaagcggctggcaaccatggggctgattgaaatgatcccctggcgtggcgtgtttttaacggcagaaggagagaagctggcgcaggaaagccgcgagcgacatcagatagtcgaaaatttcttgttggtgttgggcgtcagtccggaaatcgcccgtcgcgacgcggaaggcatggagcaccatgttagtgaagagacgctcgacgcttttcgtttgtttacccagaaacacggtgccaaatgagcctgccttttttacgcacgctgcaaggcgatcgtttttttcagttattaattcttgttggtatcggattaagctttttcgtgccctttgcaccgaaatcctggcctgctgctatcgactggcacaccatcatcaccttaagcggcctgatgctgctgaccaaaggtgtggagttaagcggttattttgatgtgctggggcgcaaaatggtgcgccgctttgctacggagcgtcggctggcgatgtttatggtgctggcggcggcgctgctttctacctttctgaccaacgatgtcgcgctgtttattgttgttccgctgactatcacgctaaaaagactgtgtgagatcccggttaatcggctgattatttttgaggcgctggcagtcaacgctggtagcctactgacgccaattggcaacccgcaaaatattcttatctggggacgttctggtcttagctttgccggatttattgcccaaatggcaccgctggctggcgcaatgatgctgacgctcctgctcctgtgctggtgttgtttccctggaaaggcgatgcaataccatacgggggtgcaaacaccggagtggaaaccgcggctggtgtggagttgtctggggctgtatatcgtctttctgacggcgctggagttcaaacaagagctgtggggactggtgattgtggcggcaggctttgcgctgctggcacgtcgcgtggtgctcagtgtggactggacgctgctgctggtgtttatggcgatgtttatcgacgtccatttactgacccagcttccagcgttgcaaggcgtgttgggtaacgtgagtcatctatctgaacccgggttatggttaacggcaatcggtttaagccaggtgatcagtaacgtgccgagtaccatattgttgctgaactatgtgccgccgtctttattactggtatgggcggtaaacgtaggtggctttgggttattacccggaagcctggcaaatttgattgcgctacgtatggcgaacgatcgccgcatctggtggcgtttccatctctatagtataccgatgctgttgtgggcggcgttggtgggatatgttttgttagttatactcccggccaactaaggtctggcaaataaaaaaggcggattatgagtccgccttttgctttaagttttgaagattaattcagacgaaccggcatcccggagcggtttttaatcgcttcatcaagaacaacctggtcaacatctggctgaccggtcactgtctgcacgctcttcgtcagggtaattggcacaatttcctgaccttcaaactgggcttcggtggtagacagcgggttatggacttcaatataacggctgccgtctggctcggtggtcgcttttaccggctcatcaataaactgtacgcgggtaccgaccggtactttctcgaacaggaatttgatgtcttcgttacgcagacgcacacaaccatgacttacacgcaggccgataccgaagttggcgttggtgccatggatagcatacaggcgaccgatatagagtgcatacagccccatcgggttatccggacctgccggaacgacagccggaagcggttcgcccgcagcgcggtactctgcgtgcattttggcggtcggcgtccaggtcgggcctgcttttttacgctcaactttggtggtccagttgataggcgtatctttgcctaactgaccaatgccgatcggcagcacgataacggtgttggtccctttcggatagtaataaagacgcatctcagcactgttaatgacgatgccttcatgaacggtatccggcaggatcagctgctgcggaatgttcagtacagtaccgcctttcggcaggaaggtatccacacccgggttcgcttccatcatattggaaagccccatctggtactcggcggcaaaatactccagcggctgagtgttaccttcaggaatggtgatcacctgattctgaccaaccaggcgactcccgtcggttggcagaggataagttaccgcagaggcggtactgcaaaagccgacaacagcgaaggccgctgcgaataatgttttcaatttcatattcatgttaagcgagattttgtgcctggcaggccattgggttgagaatattagagtattggaagcgcattataagttcattccagctcacagtgaaatcagatgtgtacgaaatcacattttttgcctttggcttgagtgtagaccttaagcgaggagcaggatcttctttcagacttatggcataatgcgcggtttgtcatatctcttttcaggatacgcctgtgttagtttccagtaacgtcaccatgcagttcggcagtaagccgttgtttgaaaacatttccgtcaaatttggcggcggcaaccgttacggcctgattggcgcgaacggtagtggtaaatccacctttatgaagatcctcggcggcgaccttgagccgacgctgggtaacgtttccctcgatcccaacgagcgcattggtaaactgcgtcaggatcagtttgcctttgaagagttcactgtgctggatacggtgatcatggggcataaagagttgtgggaagtgaagcaggagcgcgaccgcatctatgctttgccggaaatgagtgaagaagacggctataaagtggccgatctggaagttaaatacggcgaaatggacggttactctgcggaagctcgcgccggtgaactgttgcttggcgtgggaattccagtggaacagcactacggcccgatgagtgaagttgctcctggctggaagctgcgtgtgcttctggcgcaggcgctgtttgctgatccggatattctcctgctcgacgaaccgaccaacaacctcgacatcgacaccattcgctggctggaacaggtgctgaacgagcgtgacagcaccatgatcatcatcagccacgaccgtcacttccttaacatggtctgtacccacatggcggatctggattacggcgagctgcgcgtttatccgggtaactacgatgagtacatgacggcggcgacccaggcgcgtgaacgtctgctggccgataacgccaagaagaaagcgcagattgctgagttgcaatctttcgttagccgctttagcgccaacgccagcaaatctcgccaggcaactagccgcgcgcgccagattgataaaatcaaactggaagaggtgaaagcctccagccgtcagaacccgttcatccgttttgaacaggataagaaactgttccgtaacgcgctggaagtggaaggtctgaccaaagggtttgataacggtccgctgtttaaaaatctcaacctgctgctggaagtgggtgaaaaactggcggtactgggtaccaacggcgtcggtaaaagtacgctgctgaaaacgctggtgggcgatctgcaaccggacagcggcaccgtaaaatggtctgagaacgcgcgcattggttactatgctcaggaccacgaatatgagtttgaaaatgatctgaccgtgttcgaatggatgagccagtggaagcaggaaggcgatgacgagcaggcggtacgcagtattctcggtcgtttgctgttcagccaggacgacatcaaaaagccagctaaagtgctttccggtggggaaaaagggcggatgctgtttggtaagttaatgatgcagaagccgaacattctgatcatggacgaaccgaccaaccacctggatatggaatccattgagagcctgaacatggcactggaactgtatcagggcacgctgatctttgttagtcacgaccgtgagttcgtaagctccctggcgacccgcattctggaaatcaccccggaacgcgtgatcgactttagcggtaattacgaagattacctgcgtagtaaagggatcgagtaagtgattatccgtcaccccgatactgtcggggtgacggcggctgatgacaaatgcaaaatagcctgatgcgctacgcttatcaggcctacgcagtacctgcaatatattgaatctgcaggactttgtaggccggataaggcgttaacgccgcatcaggcattaacaaagcgcatttgtcagcaatctgagtaacgtcgaatcgattttcttaatcccacatcaattcacttccattaattctcaaacatccatgcccaacgctcgcttaccgtgaatgttgaggtcggcaagcgtaaagcgtccttcccagtttgtttcatagtcctcgcgcgggaagtcgcccgggcttgcgcctttttccagtgcggccttcaccttgtgcgcgtaggcaagatttttctcgcacatcggtgccgcaggaatgtacatcacgttgccccaaccttgttgattttcaacgggggcaacggaatggatgacgtcgcagtgccaccagacggagtctccggcttcgagttttggaatgctggttaacgcctcaatcaacagtggatgccattgctcacttaccggcaatactcttccgggcgctacgccgcacagttcatcctccggcacatcatcaagcagcggacgtaacagtacgtacgccatagcttcaggaatgggcacgacgtgcagcagcccctgaccaggcagcatatcagagagcgctgtccagccctggaatgtccgaaacacggaacatttggtggtgttgtccaccgtgtactcttcaacttccgtacgatgtgccgcatgccagggatcatattgcgccagattgccattaaagacgttggcgaaaacgcgctgatacgctggaagcagccagcgttccagtgccccggagtcggtatgcgctccaagacctttggaggtcgttccgggcggacggcggcggatacggtcagggtagatgacgctcacatccgggttaaaccattgctttccatcactttcaaatgtccacagacgattgagaaagctctgcgcattcgccatttcttcactctggcgggcctgcatttgcgcctggctccagtagatggggtaaatctcgggacgactagcgctgagcgtcccgaagaaattatcgccggggcctttgtagacctcgtcaaagcggttgcggtccagatagtccagcatgctctgatcccagcctagcgcttgttcgcgggggaaatggccttttatcaccgcacaaccgcgacgtttaatctgttcgcgctgctctgcagtaacatgacctgctttgatatcggcataagacagcaccggccagacggcatcgccctgtgctttgagtgcgttgatttcagccactcgcgtggcaatgtcatcgcttagctgattaaagatctgctggacgtcgccaagctgcgcccgcagcgcgtgcttcatctgacggatagctgctttgtgatcggcaggcaatgtgtcgctggtaaaagtagaagccataaccacctctcattaactttcattcgaaaccattctgatttgcatgtgacaatataagttataaataagttaatgcaagtttaatgatttgatgtgatgtacaggatgtaaaaagaagggaaaaccggagcgcacggctccggtagagaggtcagctgttaaaaggggatgtgttatccagcaccgcctgaatcacattcagcgcgccttcatgattattatcatcggtagcgtaacgggcgatttgtttaatgttttccgcagcattgcccatcgcaaaggaataacgcgccattttcagcatctccgcatcgttaccgctgtcgccaatcgctaccacattttgcggactcagatcccagcgtttcagtaaccggctaataccgtttgctttatgtagaccgggaataatcaggtcgataaagccaaaaccactggtaacgggtttcataatgccatcgagcgctacgtgcagtttgtcgatcactaacgggatttgttcatccggcaggttgaggctaaacttgaacagtacgtcgtcaatctcctgataatcttttacaggtttcaggcgatggtagtgttttgccatcagtgcgacaaatgcttcgggggcattttcgctgacatatgcactttgcagaccgcaggcgacaaaattgagttgcttatcttttagcaactcgccaataacaatccggctttcatgtcgggtcagttcgccgtggaacaactgcttgccatgttcgtaaaccagtgcgccgttttccgcgacaaaagagatctcatcctttagctcaggaaagaaactaataagctggtaatactgattaccgctggcaacaacgaacttaatgccgcgctttttcagttcctgatattgcgccataaaacgtggttggttgtacgttttggcgtcgttaagaaaagtaccgtccatgtctgtgacgataacttttacgctcataggtgtgctcctggctcgaaaatgaaaccgtaacagtgtaataacaatgtgacgcagagcacaaattatatttcgaatgaaagtaaggatgaaattgatgatgtgaatgatttagcccggcgacgacgccgccgggccgaggagattacagcatatgttcagtacgggcgatgatatcgtcctgagcgtctggagagagcgcggtgaagaacgcggaatagcccgcgacacgcactaccagatcgcgatactgatcgggatgttttttcgcatccagcagcgtttcgcgggaaacgatgttgtactgaatatgccagcctttatgcacttcaaagaaggtacgcagcaggatcatcagtttctgcttgtcagattcgttctccagcgttgccggattcagtttctggttgagcaacacgccgccgagaatcgctgccgtaggcagtttacccacactgccaatgaccgcagtagggccaagatggtcagtaccggaggccgggcttgcgccttctgccagcggggtgtgggctttacgcccgtccggtgttgccatagtctgcgcgccaaacggtacgttagcggagatactactcgtacccgcgtaatagttgccgccaaccggaccacgaccgtagcgcggattatggtactgtttcagttcgtcgatataggtctgataagcgcgagccagcagcgtatcgacagtatcatcgtcgttgccgtacttcggcgcaccgttaatcagccgctgacgcagctgctcgtgagtcaggccgtcgaagtcatctgccagtgcggcagcaagctgttgctgaccaatcgcaccttgttcaaacaccagtttcttcactgccgccaggctgttgccgaggttggcaatgccgacctgcaggccagaaacccagtcatatttcgcgccgccttgcttgatacttttcgctcgctcaatacagtcatccaccagcgcgctgcagagaatatcgtgcacgttctcttccagcatggtgtcgacgacatattcgatttcgatacttttgcgggtgtagtaacggatttgcgtatcccacgcgtccatcacttcatcgaagttgttgaagttacctgcgctcaacgctttttcttgtggcaggaacactttgccgctggtggcatcatgcccgccttccagcgccgccagcatcacgcgggcgaagttgataaagctcatgccggtacagcgatagccccatttgccaccgacggcggtttctatacaaccaatcgctgcgtagtcataagcgtcctgcggttcaataccgagtttaataaattccgggatcacgatttcgtcgttgttgaacgccggcatcccgaagccgcaacggatcacctgtacgcaggcgtcgaggaaatcgttgctcattcctgcatggtaacgcacgctgaggttaggctgagtggaacgcaggcgaccgcaggattcgaggatcgcgtaagagagtggattcaccgcgtccattggttgaccatcaaccagattttgcccgccaatagtgacgttctgatacagcggacttcccgcagaggctttactgtgactgccggagcggatcttgttcacttccagcagtttcagccagcagctatgcagcatctcgatggcgtgttcgcgatccagcgtctggttgagttcaacgtcgcggcgatagtacgggtagagatactggtccatacgaccaaagcttacactgtgaccgttagattcgatctgcaaaatcaactggatgaagtaacacagttgcagcgcctgccagaaagtctgcggcggctggtgggcgataagatcgcagttttctgccatcgccagcagttcatcgcgacggctttcgcgggtttcggtcgcggccatttcacgcgccagggcagcgaaacgttcaatgtgttcactgactgccaccagcacgatatcaatcgctttcaggaattgctcaccgtgtaaatcttccagcaccgtcaggttgatgcggctgcgacgttccgctacttcctcgcgcagaccatcaagccctttttccagcagcagcgggaaattcaccgccaggtgcgcatcgccggaggtcatattgccttccgctttaatgattccggtcgccagcagacctttttgctcatcggtaaacatgccgtagcagcgatcctgtacggtctgaccgcgccaccacgggcacacttcatgcagaacgcgtttgttctcttcgctcaccgcaaagccagcaccgggacgatctgccagatcatcaatctctttttcgatccagctgacagtatattccgggaagatcggcgcggcgcgaacttcgcttgcctggttgccaatgatcaactcatcgtgtttgatccagatggtgcgattcgccaggtgatgcgccagtgccagcgcgcgacgtaccgggatcggcttatcgagatgttgttgatacatctcggtatagtgctgcgcgcgctcggtacagactggcggtttcacaatatgcaccagcgcatttttgtgcgctttaatgcggtcgctgagcgtgtccagtttcagtgtggtcatggttgttatcctcgtaaggtcgcggttaaccctttctggcaggcatactgctgggcaaagtcgagcagttctggcgcatcaagcggtttttccggggcgtcatagggcagattaagtaagtgatatttgttgatgcccagcgtgtggtagggcagaaaatgaatttcgccaacgtgcagctcgtcggcggcaaaatcggtaatggcttttacagaggtttcgtcggcattaaagccctgaatcagcggcacgcggataatgatttttttgcccgctgcggcgagttttttcaggttatccagcactctggcggcgttaccgtcggtccactgtttaaacggcgcgtcggcaacgtgttttaaatcggcaagaaacagatcgatatagggcagagaaggggcgatatatttccacggcacatgcagacaggtttctaccgcagtatgaatgcctgcctcgtggctggcttgcagtagcgccatcgccatttccggctgcataaagggctcaccaccgctaagcgttaaaccgccgccgctgcgatcgtaaaacggtttatcgcgcagaacggtcgtcatgatctcctcaacgcttttcacttcaccacacacggttaatgcctgtgtcggacagcagtcggttaacgccgtcagatgctccggggttaacttttcccgatgaataagcaaaccattcagcgcgcgctcaatcacttccggcgcggccttagcgcacagctcgcagccttccagacacagtcgtgcgtcatacagcagatcctgcgtgcgggcgcggctttccgggttctgacaccagcggcagcccaggctacagcctttaagaaatacgaccgtgcggataccggggccatcatgggtgctgtagcgctgaatattgaaaatcatagttgcctctctatttcgttcaagcattaaaatactttcgaatgaaagttagattgatgtgcgtcaactgttcagagagttttcccgtgatagtctacattcagacaaaaagtacattttgaggatggttatggaactgtatctggatactagtgacgttgttgcggtgaaggcgctgagtcgtatttttccgctggcgggtgtgaccactaacccaagcattatcgccgcgggtaaaaaaccgctggatgttgtgcttccgcaacttcatgaagcgatgggcggtcaggggcgtctgtttgcccaggtaatggctaccactgccgaagggatggttaatgacgcgcttaagctgcgttctattattgcggatatcgtggtgaaagttccggtgaccgccgaggggctggcagctattaagatgttaaaagcggaagggattccgacgctgggaaccgcggtatatggcgcagcacaagggctgctgagcgcgctggcaggtgcggaatatgttgcgccttacgttaatcgtattgatgctcagggcggtagcggcattcagactgtgaccgacttacaccagttattgaaaatgcatgcgccgcaggcgaaagtgctggcagcgagtttcaaaaccccgcgtcaggcgctggactgcttactggcaggatgtgaaagtattactctgccactggatgtggcacaacagatgattagctatccggcggttgatgccgctgtggcgaagtttgagcaggactggcagggagcgtttggcagaacgagcatttaaccggacgttctgcatcctcataaattgctgatgacgtggcggagtgccgcgtcttatcaggcctggaggtggcaattactgcccacacacctcacaccccggattacgcatcagtttcatttcgcgaaactgacaggtcatcgcatcgtacatgacgattttcccgctggccggtttgccataacctgccagcattttgatcgcttccattgcctgcaagctaccaattacgccgatcaacggtgccattacgcctgcttccacgcaggttaatgcattttcaccaaacaaacggctaaggcagcgatagcacggttcaccgtcctgataagtaaagacggtgatttgaccttccatacgaattgccgcgccggaaaccagcggtaccttcgcggcaaaacagcctgcgttcagttgattacgtaccgcaacgttatccgtacagtcgagcaccagatcgtgttcagcaatcaatgctgcaagttctgcgtcatccagcagtgcattgactggcgtaatcgcgatatgtgggttgatccgcgtcagggcgtcacgggcggattccaccttcggttgcccgaccgtggcatcactgtgcagtgtctggcgttgcagattgctgaggctaaccgtgtcgaagtcgagcagcgtcaggttaccgacaccggcgcttgccagatactggctggctgcacagccgaggccgcccaggcccactatcagcacgcgagaatctttcagcgcctcctggccgtcaaaatcaaagccgcgcagaatgatttgccggttgtagcgcagcatctcctgatcgctgagttccgccattacaggcctccgaacaacgcgttaaacggttctacttccacccattcgcccacttccacattgccgcgatcgcgttccagcacgataaagcagttgccgaggctaaaggagctaaatatatgactaccctgatgtccggtggtcgtcacttccagttcgccatcggcgttgcgttgcagcacgccgcgctggaaatcaagacgtcctggcgtttttttcaggcgggacgctgtgcgtacgcgctggcgcgcgggcaggccgctggcggtgttaccgcttagttttgccagcaaaggctgtaccagttgatagaaggtcagcgtcgcactaaccgggttgcccggcaggccgcagaaccagctattgctgagtttaccgaacgcgaacggtttacctggtttaatcgccagcttccagaaggcgatctcccccagctcttcaagaatcgttttggtgtaatccgcctcacccacactaacaccgccggaactgatcaccacatccgcctggctgtcggcttcaataaatgcggcgcgcagggcatggggatcgtcgcggataatccctaagttaattacctcgcatcccaactgttctaacatcaggtgtacggcgagacggttggtatcgtagatttggccgtcgcccagcggctgaccgggcaactggagttcatcaccggtagaaaaaagcgctacacgcactttacgaatcaccggaacttcggcaatccccagactagcaattactggcagctctgcggtagtcaggcgagttcccgccgggaaaacaaccgcacctgcagagatatcttcaccgcgacggcgaatattttgcccgctacgcacttcagcagtaaaacgcacgccattgtccatttgttcagtctgctcctgcatcaccaccgcttcgcagccttccggcaccggcgcaccggtcataatacgaatgcaggtacccgcaggccattcaccatggtatggctgaccggcaaaggatttaccggcaacgggcagcggttgcccggaggcaatatcggctaaacgcaccgcgtagccgtccattgcggagttatcaaaccccggaacatcaagcgggctaacgacatcgctcgccagaatacgaccaaaacactgtaccagtggcagcgtttcctgggcggtcagtggggtgacgcgagaaagcatctcattaagcgcggtgtcgaggctcatcaatccggtggtaaattccatgaaaacactcctgcggaggcaaaatcgaatttgcctattatgtcagaaaaacgccacagactgtatgccacctcgggcgtagcgctgggtcctgcctttacatgccatatccatctttctatattcaaaaattgaatgagtaattcataaaaattctgatatttatagcaaaagtggcgaaccacccttaatggacgaatactatgggcaaagcagtcattgcaattcatggtggcgcaggtgcaattagccgcgcgcagatgagtctgcaacaggaattacgctacatcgaggcgttgtctgccattgttgaaaccgggcagaaaatgctggaagcgggcgaaagtgcgctggatgtggtgacggaagcggtgcgtctgctggaagagtgtccactgtttaacgccggaattggcgctgtctttacgcgtgatgaaacccatgaactggacgcctgtgtgatggatggtaacaccctgaaagccggtgcggtggcgggcgttagtcatctgcgtaatccggttcttgccgcccggctggtgatggagcaaagcccgcatgtgatgatgattggcgaaggggcagaaaattttgcgtttgctcgtggcatggagcgcgtcagcccggagattttctccacgtctttgcgttatgaacaactactggcagcgcgcaaggaaggggcaaccgtcctcgaccatagcggtgcgccactggatgaaaaacagaaaatgggcaccgtgggggccgtggcgttggatttagacggcaatttggcggcagccacgtccacaggcggaatgaccaataaattacccggacgagttggcgatagtcccttagtgggtgccggatgctacgccaataacgccagtgtggcggtttcttgtaccggcacgggcgaagtcttcatccgcgcgctggcggcatatgacatcgccgcgttaatggattacggcggattaagtctcgcggaagcctgcgagcgggtagtaatggaaaaactccctgcgcttggcggtagcggtggcttaatcgctatcgaccatgaagggaatgtcgcgctaccgtttaacaccgaaggaatgtatcgcgcctggggctacgcaggcgatacgccaaccaccggtatctaccgtgaaaaaggggacaccgttgccacacagtgatgaacttgatgccggtaatgtgctggcggttgaaaatctgaatattgcctttatgcaggaccagcagaaaatagctgcggtccgcaatctctcttttagtctgcaacgcggtgagacgctggcaattgttggcgaatccggctccggtaagagtgtgactgcgttggcattgatgcgcctgttggaacaggcgggcggtttagtacagtgcgataaaatgctgttgcagcggcgcagtcgcgaagtgattgaacttagcgagcagaacgctgcacaaatgcgccatgttcgcggtgcggatatggcgatgatatttcaggagccgatgacaagcctgaacccggtatttactgtgggtgaacagattgccgaaagtattcgtctgcatcagaacgccagtcgtgaagaagcgatggtcgaggcgaagcggatgctggatcaggtacgcattcctgaggcacaaaccattcttagtcgttatccgcatcaactctctggcgggatgcgccagcgagtgatgattgcgatggcgctgagttgccgcccggcggtgctgattgccgatgagccaaccaccgcgctggatgtcactattcaggcgcagatcctgcaattaatcaaagtattgcaaaaagagatgagcatgggcgttatctttatcactcacgatatgggcgtggtggcagagattgccgatcgggtactggtgatgtatcagggcgaggcggtggaaacgggtaccgtcgaacagatttttcatgcaccgcaacatccttacacccgtgcgctgttagctgctgttccgcaacttggtgcgatgaaagggttagattatccccgacgtttcccgttgataagccttgaacatccagcgaaacaggtcccccccatcgagcagaaaacggtggtggatggcgaacctgttttacgagtgcgtaatcttgtcacccgtttccctttgcgcagcggtttgttgaatcgcgtaacgcgggaagtgcatgccgttgagaaagtcagttttgatctctggcctggcgaaacgctaagcctggtgggcgagtctggcagcggtaaatccactaccgggcgggcgttgctgcgcctggtcgaaagccagggcggcgaaattatctttaacggtcagcgaatcgataccttgagtcccggcaaacttcaggcattacgccgggatattcagtttatttttcaggacccttacgctagcctggacccacgtcagaccatcggtgatagcattatcgaaccgctgcgtgtacacggtttattgccaggtaaagacgcggctgcacgcgttgcgtggttgctggagcgcgtgggcctgttacctgaacatgcctggcgttacccgcatgagttttccggcggtcagcgccagcgcatctgcattgctcgcgcgttggcattgaatccaaaagtgatcattgccgacgaagccgttagcgcgctggatgtttctattcgcgggcagattatcaacttgttgctcgatctccagcgtgatttcggcattgcgtatctgtttatctcccacgatatggcggtggtagagcggattagtcatcgtgtggcggtgatgtatctcgggcaaattgttgaaattggtccacggcgcgcggtcttcgaaaacccgcagcatccttatacgcgtaaattactggcggcagttccggtcgctgaaccgtcccgacaacgaccgcagcgtgtactgctgagcgacgatcttcccagcaatattcatctgcgtggcgaagaggtggcagccgtcagcttgcaatgcgtcgggccggggcattacgtcgcacaaccacaaagtgaatacgcattcatgcgtagataacattcaggcggagaataaaatggcaagagctgtacaccgtagtgggttagtggcgctgggcattgcgacagcgttgatggcatcttgtgcattcgctgccaaagatgtggtggtggcggtaggaagcaatttcaccacgctcgatccgtatgacgcaaatgacacgttatctcaggccgtagcgaaaagcttttaccaggggctgttcggtctggataaagagatgaaactgaaaaacgtgctggcggagagttataccgtttccgatgacggcattacttacaccgtgaaattgcgggaaggcattaaattccaggatggcaccgatttcaacgccgcggcggtgaaagcgaatctggaccgggccagcgatccggcgaatcatcttaaacgctataacctgtataagaatattgctaaaacggaagcgatcgatccgacaacggtaaagattaccctcaaacagccgttcagtgcgtttattaatattcttgcccatccggcgaccgcgatgattagtccggcagcgctggaaaaatatggcaaggagattggtttttatccggtgggaaccggaccgtatgaactggatacctggaatcagaccgattttgtgaaggtgaaaaaattcgcgggttactggcagccaggattgcccaaactggacagcataacctggcgtccggtggcggataacaacacccgcgcggcaatgctgcaaaccggtgaagcgcagtttgctttccccattccttacgagcaggccacactgctggagaaaaacaaaaatatcgagttgatggccagtccgagtattatgcagcgttatatcagtatgaacgtgacgcaaaagccgttcgataacccgaaggtccgtgaggcgctgaattacgccattaaccgtccggcgctggtgaaagttgcctttgcgggctatgcaacgccagctactggtgtggtaccgccaagtatcgcctacgcgcaaagttataaaccgtggccttacgatccagtgaaagcgcgcgaattactgaaagaggcgggatatcccaacggtttcagtaccacgctgtggagcagtcataaccacagcaccgcgcagaaagtgctgcaatttacccagcagcagttagcgcaggtcgggattaaagcccaggtgactgcgatggatgccggacagcgggcggcagaagttgaaggtaaagggcaaaaagagagcggcgtgcggatgttctacactggctggagcgctagtaccggcgaagcggactgggcactaagcccgctgtttgccagccagaactggccaccgacgctgtttaataccgcgttttacagcaataaacaggtggatgacttcctggctcaggcactgaaaactaatgatccggcggaaaagacccgcttatataaggcggcgcaggatatcatctggcaagaaagcccgtggatcccgctggtggtagaaaaactggtgagcgcacacagtaaaaacctgaccggtttttggatcatgccagacaccggcttcagctttgaagacgcggatttgcaataagcaacgcagggagtggaatgcttaattacgttatcaaacgcttactggggttgattccgacgctgtttatcgtcagcgtgctggtgtttttatttgtccatatgctgcccggcgatccggcgcgattgattgccgggcccgaagctgatgcgcaggttatagaactggtgcgtcagcagctggggttggatcagccgctgtatcaccagttctggcactatatcagcaatgctgtgcagggggattttggcctgagcatggtgagccgtcgtccggttgccgatgagattgccagccgctttatgccaacgctgtggctgaccataaccagtatggtctgggcggttatatttggtatggcggcgggaattatcgccgccgtctggcgtaaccgttggccggatcgattgagtatgaccattgcggtgagcgggatcagctttccggcatttgctctggggatgcttttaattcaggtattctccgttgaactgggctggctgcctaccgtgggagcagacagttggcagcactacattttaccctccctgacgctcggcgcggcagtggccgccgtgatggcgcgctttacccgcgcgagctttgtcgatgttttaagcgaagattatatgcgtaccgcgagggcgaaaggggtgagcgaaacctgggttgtcctcaaacacgggctacgtaacgcgatgatcccggtagtgaccatgatgggcttacagtttggctttttgctcggtggttccatcgttgtggagaaagttttcaactggccgggacttggacgcttactcgttgactccgtagaaatgcgtgattacccggtgattcaggcggaaattctgcttttcagcctggaatttattcttatcaacttagtggtggatgtgctttacgccgccattaacccggctatcaggtacaagtaaggatgcgactatttaactggcgacgtcaggcggtgttaaacgccatgccactggtcaaacctgaccaggtacgtacaccgtggcatgaattctggcgacgatttcgccgtcagcatatggcgatgaccgccgcattattcgttattttattgattgtggtggccatttttgcacgctggatcgctccctatgacgccgaaaattattttgattatgacaatctgaataacggaccttctttgcagcactggtttggcgtcgatagtctggggcgtgacattttcagccgtgtcctggttggtgcgcaaatcagcctggcggcgggcgtgtttgccgtgtttatcggtgcggcgatcgggacgttgctgggcttgctcgctggatattatgaaggctggtgggatcggctgatcatgcgcatttgcgatgtgctgtttgccttcccgggtattttactggcgatcgctgttgttgcggtgttgggaagcggcattgctaacgtgattattgcagtcgccattttttccatccccgcgtttgcccgcctggtgcgcggcaacacgctggtgttgaaacagcaaacctttattgagagtgcacgcagtattggtgccagcgatatgaccgttttgttgcgtcatatcctgcctgggaccgtctcttctatcgtggtgtttttcaccatgcgcattggtaccagcattatctctgccgccagcctcagttttctcggcctcggtgcgcagccgccgacaccagagtggggagcaatgctcaatgaggctcgagcggatatggttatcgcgccgcatgtcgctgtttttccggccctggctatttttctgaccgtactggcgttcaatttgttgggcgatggtttacgcgatgcgctggatccgaaaattaaaggataattacgtttgaatattgcttgaaagggtaatcacctcacaggaaattattgccctaagcaagtgttgtaactttctgctgattttgtagaatcgggtaatttggttaaaaagccgcagcaagggacaatttttgcagcggcacagcgttcagatagttattttgttaaatgtattaacatgctgagtttatacgaaaagataaagataaggctgataattttatttttattggcagcactgagttttattggtctttttttcatcattaactatcaactggtaagcgagcgcgcggtaaaacgtgccgatagccgctttgaacttattcagaaaaacgttggctatttctttaaagatattgaacgtagcgccctgacattaaaggacagtctgtatttattaaaaaatacagaggagattcaacgcgccgtgattcttaaaatggaaatgatgccatttttagacagcgtgggactggtacttgatgataataaatattatctttttagccggagggcgaatgataaaatcgttgtttatcatcaggaacaagtaaatggaccgcttgtcgacgagagtgggcgggttatttttgccgattttaacccaagcaaacgaccgtggagcgtggctagtgatgactctaacaacagctggaatccggcatacaattgctttgatcgtccgggtaaaaaatgtatctcttttacgctacacatcaacggcaaagatcacgatttgttagcggtggataaaattcatgtcgatttaaactggcgatatctgaacgagtatcttgatcaaatcagcgctaatgatgaagttctatttttgaaacaaggccatgagatcattgccaagaatcaactcgctcgtgaaaaactgattatttataatagcgaaggtaattataatattattgattctgtcgatactgaatatatcgaaaaaacaagtgcggtgccaaacaacgcattattcgaaatctatttttattatcctggcggtaatttattgaacgcaagtgataaacttttttatctgccgtttgcgttcattattatcgtattgctggtggtttatttaatgaccactcgtgtgttccgtcggcaattttctgaaatgacagagctggttaatacgctggcgtttttgcctgacagtacggatcaaatcgaggctctgaaaattcgtgaaggcgatgcgaaagagattatcagcatcaaaaatagcatcgcggaaatgaaagatgccgaaattgaacggagtaataaattgctcagtctgatctcttacgatcaggaaagtggttttattaaaaatatggcgattattgagtctaacaataatcagtatctggctgtggggatcatcaaactgtgtggtctggaagccgtggaagcggtgtttggtgttgatgagcgcaataaaatcgtcaggaaattgtgtcagcgaattgccgagaaatatgcgcaatgctgcgatatcgtgacattcaatgccgatctctatttacttctgtgtcgggaaaatgtacagacatttacccgtaaaatagcgatggtaaacgattttgacagcagctttggctaccgcaatctgcgcatccataagtctgccatttgtgaacctttgcagggggaaaacgcctggagttacgcagaaaaactgaaactggcgatttccagtatccgtgaccatatgttcagtgagtttattttctgtgatgacgcgaaactcaacgaaatagaagagaatatctggattgcgcgtaatattcgccatgcaatggaaattggcgaactattcctcgtctatcaaccgatcgttgatattaacacccgcgccattctgggcgcggaggcgttgtgccgttgggtgtctgcggagcgggggatcattagtccgctgaagttcattaccattgctgaagatatcgggtttatcaatgagctgggttatcagattattaaaacggcaatgggtgaattcagacattttagtcagcgtgcgagcctgaaggatgatttcttactgcatattaatgttagcccctggcagttaaacgaaccacactttcatgagcgttttaccaccatcatgaaagaaaatggcctgaaggcgaacagcctctgtgttgagatcactgaaaccgtgatcgagcgaattaatgaacatttttatctcaatattgaacaactgcgtaaacaaggggtacggataagcattgatgactttggcaccggtttgagtaacctgaaacgtttttatgaaattaatccagacagcataaaggtggacagccaattcaccggcgatattttcggtactgcgggaaaaattgtgcgcattattttcgacctggcacgctataaccggatcccggtgattgcggaaggcgtagagagcgaagacgttgcgcgcgaattaatcaaattaggatgtgttcaggctcaggggtatctgtaccagaaacccatgccattctccgcctgggataaaagtggaaaattagtaaaagagtaatttacgtatgtccagaatcaataagttcgtacttacagtcagtctgctgatttttatcatgattagtgcagttgcctgcgggatctacactcaaatggtaaaggaacgggtgtatagcctgaaacagtccgttattgatactgcttttgcggtggcaaatattgctgaatatcggcgtagcgtggcaattgatcttatcaacacgctaaatcccacggaggaacagctgttggttggtttgcgcacagcttacgccgacagcgtttccccctcttatttgtacgatgtcggtccttatctgatttccagtgacgaatgtattcaggtaaaggagttcgagaaaaattattgtgcagatattatgcaggttgtgaagtatcgacatgtcaaaaatacagggtttatctcttttgacggtaaaaccttcgtctattacctctatccggtaactcacaatcgtagtctgatatttttgcttggtctggagcgtttttctttactgagtaaaagcctggcgatggacagcgagaacctgatgttctctctatttaagaacggtaaaccggtgaccggtgatgaatataatgctaaaaacgccatcttcaccgttagcgaagcgatggagcacttcgcctatttgccgaccggattgtatgtatttgcgtataaaaaagatgtttatttgcgggtttgtacattgattattttctttgccgcattggtggcagtgataagcggtgccagttgcctctatctggtacgcagagtgattaatcgtggtattgtggagaaagaagccatcattaataaccattttgaacgcgtactggatggcgggcttttctttagcgctgccgatgtcaaaaaactctacagtatgtataacagcgcgttcctggacgacctgaccaaagcaatgggcagaaaatcctttgacgaagatttaaaagcgctgccggaaaaaggcggttatttgtgcctgtttgacgtcgataaattcaaaaacattaacgacaccttcggtcatttgctgggcgatgaagtgttgatgaaagtggtgaaaatccttaaaagtcagatcccggtagataaaggtaaagtctaccgcttcggcggtgacgaatttgcggtgatttatacgggtggaacgctggaagagttgctaagcattctaaaagaaatcgttcatttccaggtgggaagcattaatttaagtaccagtatcggtgtagcacatagtaatgaatgtcctaccgtcgaacgcttgaaaatgctggcggatgagcggctgtataagagtaagaaaaacggcagggcacagattagctggcagtaatcattattcgcaggccggacaaatgattttgcccggcctgaattaattaaacccggctaccccacaaatcgtactcatcggcgtgctcgactttcacacgcaggatatcacccggcttaacgttggtttcaccattgagataaaccgcgccgtcgatttccggtgcatctgccatgctgcgaccaatcgcgccttcttcgtccacttcgtcgataatcaccagaatttcacggcccactttctcttgcaggcgctcggcggaaatctgctgctgcagctgcatgaaacggttccagcgttcttctttaacttcttccggaacctggtcaggcagggcattggcgtctgcaccttcaaccgggctgtatttaaagcagccaacgcgatccagacgcgcttctttcaggaagtcgagtagcatctggaaatcttcttctgtctcgccagggaagccgacaataaaggtactgcgtagggtcagttccgggcagatttcgcgccactgtttgatgcgcgccagttggcgatctacagaacccggacgcttcatcagtttgagaatgcgcgggctggcgtgctgcaacggaatgtccagatacggcaggattttgccttctgccatcagtgggatgacgtcgtccacatgcggataagggtaaacgtagtgcagacgtgtccagatccccagtttgcttaactgttcgcacaggctgaccatgctggtttttaccggctcgccgttgtggaagccagtacgatgtttaacatcaacgccataggcggaagtatcctggctgatcaccagaatctctttaacgcccgcatctaccagacgtttcgcttcacttaacacttcgccaatcggacggctcaccaggtcgccgcgcatagacggaataatgcagaaggtgcagcggtgattacagccttcagaaattttcagataggcataatgacgcggcgtcagtttcacaccttgttctggcaccaggctcaggaatgggttgtgtttcggttttggcacgtagtgatgaacgtgctccagaacctgctcatagctatgaggcccggtgatttccagcactttcgggtggacttcgcggatctgatcttcttttgcccccagacaaccggtcacaataaccttgccgttttcattcaacgcttcaccaatggcttccagactttcttgtaccgcgctgtcaataaagccgcaggtgttgacgatcaccatgtccgcatcgtcatagctcggtaccacgtcataaccttcagtgcggagttcggtgagaatacgctcactatcaacaaggtttttcggacagccaagggaaacaaagccgattttcggctggggagttactttgctcatagcttaaaaaatattcagttacaggaaaggtcagggcagggattctacagagttctggataaaatttgtatcgcaatctcattcgctggcggaggcgaaggaaatgtaaattttgttaattcggcgtgaagaattgatcctggacagcattttgctcaaaaaatagccatactatttaattgcaacaaggctgggaagaggaggatcgaagtatgttcgttgacagacagcgaatcgatctgctgaaccggttgatcgacgcacgcgttgacctcgccgcatacgtgcaactgaggaaggcaaaaggatacatgtccgtcagcgaaagcaatcatctacgagataacttttttaaactgaatcgcgaactgcacgataaaagcctgcggttgaatcttcatctggatcaggaagagtggagtgctcttcatcatgctgaagaagcattagcgacagccgcagtatgtttgatgagtgggcaccatgattgcccgactgttattaccgtcaacgccgataagcttgaaaattgtctgatgagcttaacgctgagtatccagagcctgcagaagcacgccatgcttgagaaggcctgaaaactaagggggagaaagcgtctcccccttcatgtttaagtttttgtaaaaatgaatttgttatctcctccactgactacgctttaagccagagtcaatccggaggcgttatgcatcgacaatcctttttccttgtgccccttatttgtctttcttccgctctctgggcggctcctgcaacggtaaatgtcgaagtactgcaagacaaactcgaccatccctgggcactggcctttttacccgataatcacggtatgttaatcactctgcgcggcggcgagttgcgtcactggcaagcaggaaaaggattatctgcgccgctttccggagttccggacgtttgggcgcacgggcagggcggcctgctggacgtggttttagcgcctgattttgctcagtctcgccgcatctggttaagttattccgaagttggcgatgatggcaaagccggaactgctgtgggttatggccgcttaagtgatgatctcagtaaagtgaccgacttccgcaccgtctttcgccagatgccaaaactgtctaccggcaaccattttggcgggcggctggtattcgacggtaaaggttatctttttattgctctgggcgaaaacaatcagcgcccgacggcgcaggatctggataaattacagggcaaactggtgcgtctgaccgaccagggcgaaatcccggatgataatccttttataaaggaatccggtgcgcgcgccgagatctggtcttatggcattcgtaatccgcaaggaatggcgatgaatccgtggagtaatgcactgtggctgaatgaacatggcccgcgcggtggtgatgaaattaatatcccgcaaaaaggcaaaaactacggctggccgctggcaacctggggaatcaactatagtggctttaagataccggaagcgaaaggggagatcgtcgccgggaccgagcaacctgttttttactggaaagatagccccgctgtgagcggcatggccttctataacagcgataaattcccccagtggcagcaaaaattatttattggcgcgctgaaagataaagatgtcattgtgatgagcgtcaacggcgacaaagtgacagaagatggccgtattttaacggacagagggcagcgaattcgtgatgttcgcactggacccgacggttatttatacgttctcaccgacgagtccagtggggaattacttaaagttagcccacgcaattaactaacgggaatcatcaccactttgcgcactgcggggcgttcagtgagttgctgataccagcgttgcagatttggacgcggtgtccaggtcaggccaacgttaaacaaattgtagatgaacggtgcgatagcgatatcgcccacaccaaactcgtcgccagagaaccattttacttttgccagttccgcatcgagcagggcaaacagggcgtcgcactctttgcaactggcatcaatggcggcctgatcgcgctcttccggtggtgttctgactaatcccatcaggatcccgcgatgagcattactgagcgtctggtttgcccagtccatccatttttccgcttccgcacgacgtgccggactgtcgatccacaggcgtttttgcccgtactgtgccgccagatagcggacaatggcgttactttcccaaagaatgagatcactttcgtcgtcacgcaacaacggcaccagcccgttagggttcatcgccagaaaatcagcatcgtgatttatcccaaactcacggcccgcgagaatttgctcataaggtagttccagttcttcgagcgtcagcaatactttttttacgttagtactattattccgaccccacagcgtaatcatactcaccccttttccgacaggcagccacaggctgaacaggactccgatggtgaagtaaagttaacttttaagcaacagctggcaaaaaaatgacaccagaagcagcgaagcggcaggatattgcataaactttaaaaactttaccaacttacggtttctttaagtttgtgtgtgcgttattaatcaccaaacttatcatacggcgatataacgtattttttttgaatggatactcgggtggcatttatgacgcaatactcctctctccttcgtggtcttgcagcgggttctgcatttttattcctttttgccccaacggcattcgcggcggaacaaaccgttgaagcgccgagcgtggatgcgcgtgcatggattttaatggattacgccagcggtaaagtgctggcagaaggcaatgcggatgagaaactggatcccgcgagcctgactaaaatcatgaccagctatgtggttgggcaggcgcttaaggccgataagattaaactcaccgatatggtgacggtcggtaaagatgcctgggcgacgggaaatccggcactgcgtggtagtagcgtaatgttcctcaaaccgggcgatcaggttagcgtggcagacttgaacaaaggtgtgattatccagtccggtaatgacgcctgtattgcgctggctgattacgttgccgggagccaggagagttttattggtctgatgaatggttatgccaaaaaactgggtctgaccaacactaccttccagacggtgcacggcctggatgcgccggggcagttcagcaccgcgcgcgatatggcattgctgggtaaagcattgatccacgatgtgccggaagagtacgccattcataaagagaaagagttcaccttcaacaaaattcgtcagcctaaccgtaaccgtctgctgtggagcagcaatctgaatgttgatggcatgaagacaggaaccacggcaggcgcgggatataatctggttgctagcgctacccagggcgatatgcgtttaatctccgtagtgttgggggcgaaaaccgaccgtatccgttttaatgagtctgagaaattattgacctggggtttccgcttctttgaaaccgtgacgccaattaaacctgatgccacctttgtgactcagcgcgtctggtttggtgataagagcgaagtgaatctcggggcaggtgaagcgggcagtgtgaccataccgcgtgggcagctgaaaaacctgaaagcgagttatacgttaacggaaccgcagcttaccgcaccgctgaaaaaaggtcaggttgtcgggaccattgatttccagcttaacggtaaatccattgagcagcgtccgctgatcgtgatggaaaatgtggaagagggcggattctttggtcgggtgtgggatttcgtgatgatgaaattccatcagtggttcggcagctggttctcttaatcttctgataaccggatggcgcgaaacgtcatccggttatacgtcattaatacatcaacttaatgcgctgcgtctgcgcgtacttcacatactcatcttccgggcaacaatcgctcaccacaatatcaaagcgtttcaggtcacccatgcgcgccggacgcaccttgccaaatttactgtggtcgacaaccagcacatgcttttgcgccatgctcatggcccagtgttttaccggcaactcttcaagattaaaacaggtagcgcctttactgacatgcacgcccgccgcagaataaaaagcgatatccgggcaaaaattattcagcgtttgctgaaaatcgatgggtttgaaaatggcgttgctggcgtgaaattcaccaccgcaaagaaacgcgcggcaatggggtttctctttcagcgccagaaaggtatttaggctataacaaacggcggtaaaagggatttcattatcaatcgcttcaataatccacggcgtggtggtgccacagtcaaaaaagagggtctgatcgggttctaccagcgtcgcagccagttttgccgcccggcgtttttcttccaccaggcgggatttttgatcgcttaacaggtaatggctggcactgcgcggttccagaacaatatagccgccgagcaaaacgacgggcgcactgtggttgttcagatcgcgacgaatcgtcatctcgctaaccccaagcagggcggcggcgtctttaagatgtaacttatcgctgcgttttaattcttgcagcagctgcccgatacgctcttcgcgacgtgtttccataatccctctgaatagttattgaagcgagccgctcaatactacactttttagcagagatcagtcacgcacccagcctttgcggatcggtaatgcaaaacagacgcgataccagctttgcagacgttgatagagtttatgccccatcgcttgccagataatctgggcactaaggcagccaatcatacctgccagcaatccaccgagcatatccagcggccagtggacgccaagataaacgcggctccaggcaatgacgacggccagcaccattaaaagactgccggaccacaggcgatgccagcataaaaatgccagtgcaaaggtgaaaatcaccgtaccgtgatcgcttgggaaactgtcatccgccgcatgatgcaggaagttatagccgatattttcgacaaagggtcggtcgtgcggaaaaagatgtcccatcgtccaggacacaaacaggctgaccgccagcgcgatagcgatttttatcaccagttgccgttgtgctgtaagcccccacaaccaaagtaccacggccagcaacggcaccacggtaatcaaatctttagcaataaaaatcgccaagctgatcatccacggagcgctgtctggcgtcgcgttaataagagagaatagagagagattcaaattttccagcataacttcccgacgcaaagtgattaaaagggagccaatacaggcaagtcgttgagaataaagtgcaggttaaactgggtaaagcggcatcgtcttatttccctcaagcggcctgtttacggtgggtgattgtaacgggcataggttaaataaaacttaaagaaagcgtagctatactcgtaataatgtaagaatgtgcttaaccgtggtttcagctacaaaattcgctttctcgttagctgcgcttttattaaactctgcgcgattattattggcgaagaaattgcatgcaaaataaattagcttccggtgccaggcttggacgtcaggcgttacttttccctctctgtctggtgctttacgaatttagtacctatatcggcaacgatatgattcaacccggtatgttggccgtggtggaacaatatcaggcgggcattgattgggttcctactagcatgaccgcgtatctggcgggcgggatgtttttacaatggctgctggggccgctgagcgatcgtattggtcgccgtccggtgatgctggcgggagtggtgtggtttatcgtcacctgtctggcaatattgctggcgcaaaacattgaacaattcaccctgttgcgcttcttgcagggcataagcctctgtttcattggcgctgtgggatacgccgcaattcaggaatccttcgaagaggcggtttgtatcaagatcaccgcgctgatggcgaacgtggcgctgattgctccgctacttggtccgctggtgggcgcggcgtggatccatgtgctgccctgggaggggatgtttgttttgtttgccgcattggcagcgatctcctttttcggtctgcaacgagccatgcctgaaaccgccacgcgtataggcgagaaactgagtctgaaagaactcggtcgtgactataagctggtgctgaagaacggccgctttgtggcgggggcgctggcgctgggattcgttagtctgccgttgctggcgtggatcgcccagagcccgattatcatcattaccggcgagcagttgagcagctatgaatatggcttgctgcaagtgcctattttcggggcgttaattgcgggtaacttgctgttagcgcgtctgaccagccgccgcaccgtacgtagcctgattattatgggcggctggccgattatgattggtctattggtcgctgctgcggcaacggttatcagtagccacgcgtatttatggatgactgccgggttaagtatttatgctttcggtattggtctggcgaatgcgggactggtgcgattaaccctgtttgccagcgatatgagtaaaggtacggtttctgccgcgatgggaatgctgcaaatgctgatctttaccgttggtattgaaatcagcaaacatgcctggctgaacgggggcaacggactgtttaatctcttcaaccttgtcaacggaattttgtggctgagcctgatggttatctttttaaaagataaacagatgggaaattctcacgaagggtaaaaaaatgcctgactgctttgtgcgatcaggcattctcgaattaatggtgatggtcgtcaatctggtgttcgataaccatcccttcacctacgctggcaagatggcgaacataaggatgcgggcggtaagccggagctggcgcaggagccacatagacggtttgcggcacagtcgcgacgctgaccgcttgtggaacgctgacactatcaggaaccacaaccactttgtatccactcggcacatcgacggtgacactttgcgccatcgccacaccagtaaagcccattaaaagcgcgcccaacagtagacaatttttcataatcatttcgcctgaaataatgcagcgggttaatttccgcgaattatgcagccttcattcaggcattgtgttgccgggcgtgctgccggttttattggtcaaatggcgcttcgtgtttaagaactttatcgatcacatccagtacgccttcacggttattggagcctgcgcggtattttgccgctgcgacgaccgcgctaccggcattttccattgcaaaactaaagcctgcctgacgcagcatctcaatatcgttaccgccatcgccaaagaccaccacttcgctgtcgtctattccccataatttctgcagttggcgaaggccattggctttatgtacgccggggataatcagatcgatgctgccgttgccggtgtggacgctcaccataatatcgccgatggcctcatgtaatgctttttgtacttgtggaatcagttcatcggaaagattcaggccaaacttaaagaagatatcctctaagttgtcaaagttatcgacgtattccagacggtgataatacatttccgccaccgttttcatggcatcgtcatattttttgagtgtataggcactattttttccgcaggcaataatttccacttccgggcgcgtcagcaaatgttccacgacagtagcaaacgcatccttgcttagctcgccattaaaaacatctttgccttcgctcactacccagccgccgttttcagccacaaaggcaatttcattagcaatttcagggaagaaagagatcaactgataatattgattcccgctggcgactacaaagcgaattccttgtgctttcatttgctgatactgagccataaaccgctcacggttataggttttttgatcgcttaagaaagtaccatccatgtctaccgcaattaatttaatgctcatcaactattctccatcgccgtctgcgttttggtatcgggtttggcgacggctttcgcgacaatagccgcgagaataaccagcgccagtacaaccagcattgcactacgtaatccataatgttcgccgagatagcccagcagcggcggcccgacgaggaaagccagataaccggtcgttgctaccacactgacgcgggttggtgcatcggggccggtatcgctggcggcagaaatggtcagcgggaagcccaggctggcacccagtccccagagtacaacagacaccccagcgacccaggcgctatcgacaaaaataatcagcccaatacccaacgcccccattagtgcactggcccgaaccacggcaacgcgactgtaacggtcgatgaaccaaccgccggtgaagcgtccaacggtcatccccagggtaaaaccggcataaatcaggctgccggaagtagggctaaaaccgtgaccgtcaaccattaataagggtaaccagtcgttggcagaaccttcggcaaaggccatcgccagcaccacaacacctatcagcagcaactggatatcgcgataaaaaggtacgcctttttcgccatgctgggtgccatcggcagcatttttgcccgtaccgtcagggattgcctgaatggcgatataaataggtgcgatacctaccagcgccgccaataaaatgtgcaccgttgccggaacgccaaaggccgtcagtgccatcccgacacctgcgcctgccagcgtgcccaggctataaaaaccgtgcatcatcggcaaaaccgtcttattcatttctcgctcaacggcagcaccttcaacgtttatcgccacttccgcagaaccaaaacttgccccaaagacgccgagaccaacggcaaagagcagggggcttgtcagccagagtgccagacttaatatcatcatcccgatcaatgcgcaggacatcgtgaccaggatgacattacgtgtcccaaagcgtttcactaaccacgcgctgcagagaataccgctcatgctaccgatgctcagaccaaagagaacaccgcccatttcagcgatgctgacagagagaatatcgcggatagcaggcgtacgggttgcccaggacgccattaacaggcctggcaaaaagaagaacataaacagcgcccaggttcggcgtttcaatgcattacgactagaatttacggtcatagatcacgtcaaaataagaagagggaagacaacattagcaaggttgtgtacatttgtacacaattgcagagagaggaaatgacatgcgtcgcgctaacgatccgcaacggcgagaaaaaattatccaggccacgctggaggcggtgaaactttacggaatacatgctgttacgcaccgcaaaattgctacccttgccggggtaccgttgggaagcatgacctactattttagtggaattgatgagttgttactggaggcgttcagcagttttactgagatcatgtcccggcaatatcaggcattttttagcgatgttagtgatgctccgggcgcatgccaggctatcaccgatatgatctacagcagtcaggttgcaacgccggataacatggagctgatgtaccagctctacgcgctggctagccgaaaaccgctattaaaaacggtaatgcaaaactggatgcagcgcagtcagcaaacgctcgaacaatggtttgaacccggaaccgcccgcgcgcttgatgcgtttattgaggggatgacgctgcattttgtcaccgaccgtaagccgctaagccgcgaggagattttgaggatggttgagagggttgcagggtaatagataagttttagataacaaaaaacccatcaaccttgaaccgaaatggcggggttgatgggctccacaaaatggggacatcaaagaaaagcagtggcactaattaagactgatgccctgcggaaaagttctgcggttgtgcaaaaaaatttcattttcagggcaacttcagttttatcctaatcctggccataccatgacgatgattgtccctgccagcgtcagcaggacgttggcgattgcataggtgcccgcatagcccagcgccgggatgttactgcgagctgtatcactgatgatctccattgccggcgcgcaggtacgtgcgcccatcattgcgccgaacaacagcgcgcggttcattcgcaatacataagcaccgaacaagaaacagataaccacgggcaccagactgacaatcaatccggcaatcaacatctgaccgccaatcgcgcccaggccgttattaataccgctaccggcgctcagaccaacgcctgccataaacaccatcaagccgaactctttcaccatgcttaatgcaccctgcggaatgtaaccgaaggtcgggtggttagcacgcataaagcccagcataattccggcgaataacaacccggcagcgttccccatgccgaaactgaatgtgctgaactggaaggtgatcatcccgatcatcagcccaataacaaagaaggcgcagaatgccagcaggtcagtgacctggctgtgaatgctgataaagccgatgcgatcggcgatggtttttacgcggcgggcatcgccgctgacttgtaaaacgtcacctttgttaagcacgacgttgtcatctatcggcatctcaatctggctacgaatgacgcggttaaggaagcaaccgtgatcggtcaacttcagttgtgcgagacgtttacctacagcgttatggtttttaacgaccacttcttcagtgacgatacgcatgtcgagaaggtcacgatcgaaaacttctttaccgttacggaagctgggatcgagtcgggcatgggcgtcgggatagcctaccaacgctatttcatcgcccatttgtagcacggcatcaccgtctggatttgccagaatcccgttacgtcgaatacgttcaatgtagcagccggtttgtcgataaatacccagttcacgcagatttttgccgtcggtccaggccaccagttccgggccgacgcgataggcgcggatcaccggtaaataaaccttacggttggcatcagtgtccaggccacgttcgcgggcgatttgctgggcgctggtctgtaagtcctgatgctgcaatttcggcaagtaacgcgcaccaacaatcaaactcaccagaccgattaaataggttaaggcatacccgaggctcagattatccagtgccagactgagctgcctgctttccatgccggaatgacgcagtgtatcgccagcaccgaccagaaccggtgtgctcgtcatagagcctgctaacataccggccgtcaggccaatatcccagccaaacagcttacctaaccctaaggcgatcaccagcgcactgccaaccatcaccagtgctaacattaggtaatttttcccatcgcgaaaaaaaatggaaaaaaagttcggtccggcttcgaccccgacgcagaaaataaacagcataaagccaagattaagcgcatcggtgttaatgctgaaatgttgttggcctaataacaggcttacgactaaaacgccaatggaattacccagttggatgctaccaagtcgtaactttccgagacatagcccaagcgcgaggaccacaaataataacagaatgtaattcccatttaacaattcggcgacgtttatattcacggaggctaacttcttgtttactagtaagctgttgaaagaaatggtaatttacgataatgttttttaccagaattcagggcgcagattcattcagcgcacctaaacgatagtaaagtaacaatatattttactagtgtaatcacattaggtatcaacggctatatgaattgcgttggcctatattagcatggaatgcgaagcggctttatcttactgaacgccacactggcgaaaaatgtgttcgatagacgcagtgtcaggaggaacgagtgaaacataaacaacgttgggcgggggcaatctgctgttttgtcctcttcattgtggtgtgcctttttctggcgacgcacatgaaaggcgcttttcgggctgccgggcatcctgaaatcggcttgctatttttcattcttcctggagcagtcgccagcttctttagtcagcgtagagaagtcctgaaacctctgtttggcgcaatgctggcggcaccctgtagcatgctcattatgcggctgttttttagtccgacgcgcagtttctggcaagagctggcatggttactaagcgcggtgttctggtgtgcgctgggggcactgtgtttcttatttatcagtagtttgtttaaaccacagcacagaaaaaatcagtaaagccctcaacgcgagggcttgtcagacgatcaggcgtccagattttctttcacccatgcagcaaaatcggtatagccgccgatatgttgctgatcgacaaaaatctgcggcacggtttctacgggtttacctgccttttgttgtagatcttctttagtgatcccttccgcacgaatatctacatactgatactgaaaatcatcgcgttcattgctcaatttctcagccagatcttttgcacgcacacagtaagggcaaccgctacgaccaaaaataacggtttgcattatttctctcctcatagatttatgcctgtaatgatcacgctaaaatgtattcgctgaaagtaggtttaacctgttgcattaattgctaaaagctataactgttaaacacaatacagtgaaaagttttagactgaaggctcactttgcagagggaagcgtatgcgcgcgatcggtaaattgcctaaaggcgtgttgatactggaatttatcggaatgatgctactggcggtggcgctgctgagcgtaagcgactccctgagcctgcctgagccattttctcggccagaagtgcagattctgatgatttttctcggtgttttgctcatgcttcccgctgcggtggtggttattcttcaggtggcaaaacgtcttgccccacagctgatgaaccgtccaccgcaatatagtcgtagtgaaagagaaaaagataatgacgccaaccattgaacttatttgtggccatcgctccattcgccatttcactgatgaacccatttccgaagcgcagcgtgaggcgattattaacagcgcccgtgcgacgtccagttccagttttttgcagtgcagtagcattattcgcattaccgacaaagcgttacgtgaagaactggtgacgctgaccggcgggcaaaaacacgtagcgcaagcggcggagttctgggtgttctgtgccgactttaaccgccatttacagatctgtccggatgctcagctcggcctggcggaacaactgttgctcggtgtcgttgatacggcaatgatggcgcagaatgcattaatcgcagcggaaagcctgggattgggcggggtatatatcggcggcctgcgcaataatattgaagcggtgacgaaactgcttaaattaccgcagcatgttctgccgctgtttgggctgtgccttggctggcctgcggataatccggatcttaagccgcgtttaccggcctccattttggtgcatgaaaacagctatcaaccgctggataaaggcgcactggcgcagtatgacgagcaactggcggaatattacctcacccgtggcagcaataatcgccgggatacctggagcgatcatatccgccgaacaatcattaaagaaagccgcccatttattctggattatttgcacaaacagggttgggcgacgcgctaaaaccgccacgtcgatgtatgatacgcgggcttttgaccaggtctgacagagaggtgcagggtgaaaattgccatattgtcccgggatggaacgctctatagctgtaagcggctgcgtgaagccgctatacagcgcggtcacctggttgaaattcttgatccgctttcttgctacatgaacataaatcctgcggcgtcttctattcactacaaaggccgcaagttaccccattttgacgcagtgatcccgcgtattggcaccgccattaccttttatgggacggcggcactgcgccagttcgagatgctggggagctatccgctcaatgagagcgtcgccattgcccgggcgcgtgacaaattgcgttccatgcaactgctggcgcgtcagggcatcgacctgcctgtcacgggcattgcgcatagcccggatgataccagcgatttaatcgacatggtcggtggtgcgccgctggtggtcaagttggttgaaggcacgcagggaattggcgtcgtgctggcggagacgcgtcaggcggcggaaagcgtgattgacgctttccgcggtctgaacgcgcatattctggtgcaggaatatatcaaagaggcgcaagggtgcgatatccgctgtctggttgttggcgatgaagtggtcgctgcgattgaacggcgggcgaaagagggcgattttcgttccaatttgcatcgtggcggcgcggcaagcgtcgccagtatcacaccacaggagcgtgaaatcgcgataaaagccgcgcgaacgatggcgctggacgttgctggtgtggatattctgcgtgctaatcgcgggccgttggtgatggaggtgaatgcgagcccggggctggaaggaatagaaaaaaccaccggtatcgacatcgcgggtaaaatgatccgctggatcgaacgccacgctacgacagaatattgcctgaaaacgggtggttaatcgcaatcacattactgatcatggttttgcctgcgctttttgcgtaagctgtgccggtctttttatcgaaagaggttgtacaaaattatgacaagcctggtcgttcctggtctggatacgctgcgtcaatggctcgatgacctggggatgagtttttttgaatgtgataactgtcaggctctgcatctgccccatatgcagaatttcgacggtgtctttgatgccaaaatcgatctgatcgataacacgatcctgttttctgccatggcggaagtccgacctagtgccgtattgccgctggcggcggatttatctgccatcaatgccagtagcctgaccgtgaaagcatttcttgatatgcaggatgataatctgccaaagctggtggtttgccagtctttatccgttatgcagggcgtaacctatgagcagtttgcatggttcgtgcgtcagagcgaagagcagattagcatggtcattcttgaagctaatgcccatcaactgctgttaccgactgatgatgaagggcaaaacaacgttaccgaaaactatttcctccactgataactcctttcgagcacgcagtcgctggtgcagtggctgcgcgctgcaaaattatctgctgtttttaaccttttcttaaagattatttcacttctcttgtgtcgatttggctttatcacatagagcaaatatgcataaaaatttgttaaataccgttttttaatccgagctatagtctcaaaccctggctaaagttattcttgcgatgcttttatatagcgagcagtgctggccgggagaaagttctcttttcttacaccgcgccgataaaaaatatgcacgtttattgcatatctttcagtgtgacaacttttgttcgtttgttaacgaactttcagaaggaaagagatatgaccgccttaaataaaaaatggctaagcggtctggttgcgggtgctctgatggccgtctctgtcggcacgctcgcggctgaacaaaaaacactccacatttataactggtctgattatatcgccccggacacggtggccaattttgaaaaagaaaccggtattaaagtcgtctacgatgttttcgactctaacgaagtactggaaggcaaattaatggccgggagtaccggctttgatctggtggttccatctgccagctttctggagcgccagttgactgcgggagttttccagccgctggacaaaagcaaattgccggagtggaagaatctcgacccggaactgctgaagctggtcgccaaacacgatcccgacaataaatttgctatgccctatatgtgggcgacgaccgggattggctataacgttgataaagttaaagcggtgctgggcgaaaacgcgcccgtcgatagctgggacttgatcctcaaacctgaaaatctggaaaaactgaaaagctgcggtgtctctttcctggatgcgccagaagaagtttttgctaccgtgttgaattatctcggcaaagatcccaacagcactaaagcggatgattacaccggaccggcaacagatctgctgttaaagctgcgcccgaacattcgttatttccatagttctcaatacattaacgacctggcaaacggcgatatttgcgtcgctatcggctgggcaggtgatgtctggcaggcgagtaaccgcgcgaaggaagcgaagaatggcgtgaatgtcagcttcagcattccaaaagaaggggcgatggcgttctttgatgtattcgccatgcctgcggatgccaaaaacaaagacgaagcctatcagttcctgaattacctgctgcgcccggatgtagtagcgcatatttccgaccatgtgttctatgccaacgccaataaagcagccacgccgctggtgagtgcggaagtccgtgagaacccaggtatttatccgcctgcggatgttcgtgcgaagctgttcactctgaaagtgcaggatccgaaaatcgaccgtgtgcgcacccgcgcgtggaccaaagtgaagagcggaaaataatccgcagtcgtagatgccggaggggcgcaccacacccgccggcaattcgcaccattatggtgcgcttgcacacattcaatgccggagagcagccgtgaatgacgctatccctcgcccgcaggcgaaaacccgtaaggcgctgacgccgctattagaaatccgcaacctgaccaaatcctacgatggtcaacatgcggtggatgatgtcagcctgaccatctacaaaggtgaaatcttcgcgctgctgggcgcatccggctgtggcaagtccacgctgctgcgtatgctggcaggtttcgaacaaccttctgccggacagataatgcttgatggcgtcgatttgagtcaggttccgccttacctgcgccccatcaatatgatgtttcagtcttacgcgctgtttccgcatatgaccgtggaacagaacatcgcttttggcctgaaacaggacaaactaccgaaagcggaaattgccagccgggtcaatgagatgctcggcctggtgcatatgcaggagttcgccaaacgcaaaccgcatcagctttccggtggtcagcgacaacgtgtggccctggcccgaagccttgcgaagcgcccgaaactattactgctcgatgagccgatgggcgcgctggataaaaagctgcgtgacaggatgcagcttgaagtggtggatattctggagcgcgtcggtgtgacttgtgtgatggtcacccacgatcaggaagaggcgatgaccatggcggggcgcatcgccattatgaatcgtgggaaatttgtccagattggcgaaccggaagagatctacgagcatccgactacccgctatagcgccgaatttattggcagcgtaaacgtctttgaaggcgtactcaaagagcgtcaggaagatggcctggtgcttgatagcccggggctggtgcatccactgaaagtcgacgcggatgccagcgtggtcgataacgtgccggtacatgtggcgctgcgcccggaaaaaatcatgctttgcgaagagccgcccgccaatggttgtaacttcgcggtgggggaggtgatacacattgcctatctcggcgatcttagcgtgcatcacgttcgtctgaaaagtgggcagatgattagcgcccagctacaaaacgcccatcgtcatcgtaaagggttaccgacctggggcgacgaagtgcgtttgtgctgggaagtggacagctgtgtggtgctgacggtttaaggagcaaagatgagtacacttgaacctgctgcccagagcaaaccgccgggcggatttaagctgtggttgagccagctgcaaatgaagcatgggcgcaaactggtcattgcgttgccatatatctggttgatcttgctgtttctgctgccatttctgattgtctttaaaataagcctggcggagatggcgcgcgctattccaccttataccgaactgatggagtgggctgacgggcaactgtccatcactcttaatctcggtaattttctgcaactgaccgacgatccgctctatttcgatgcttatctccagagcctacaggtggctgcgattagcacattttgctgtttactgatcggctatccgctggcgtgggcggtggcgcacagtaagcctagcacccgtaatattttattactactggtgatcctgccgagctggaccagctttctgatccgcgtttatgcctggatgggaatattaaaaaacaacggtgtgctgaataattttctgctgtggctgggggttatcgatcaaccgctgaccattctgcataccaatctggccgtttatatcggcattgtttacgcttacgtgccgtttatggtactgccgatttataccgcgttgattcgtattgattatagcctggtggaagcagcgctggatctcggtgcacgaccgctgaaaacgttctttactgtgatcgtgccgctgactaaaggtgggattattgccggaagcatgctggtgtttatcccggctgtgggcgagtttgtgatcccggaactgctcggtggcccggacagcatcatgatcgggcgcgtgctatggcaagagtttttcaataaccgcgactggccggtggccagcgcggtagcgatcatcatgttgctgctgctaattgtgccgataatgtggttccacaaacaccagcaaaaaagcgtgggagaacacggatgaataatttaccggtagttcgtagcccctggcggattgtgattttgctgctgggctttacctttctctacgcgccaatgctgatgctggttatctatagctttaacagcagcaagctggtgacggtgtgggccggctggagtacgcgctggtatggtgagttattgcgcgatgacgcgatgatgagtgcggttggtttaagtctgacaattgcggcctgtgcggcgacggcggcggcgatcctcggaactattgcggcggtggtgctggtgcgctttggcaggtttcgcggaagtaatggctttgcctttatgatcaccgcgccgctggtaatgccagatgtcatcacgggcttgagcctgttgttattattcgtcgcgcttgctcatgccattggctggcctgcggaccgcggtatgctcaccatctggctggcgcatgtcactttttgtacggcttatgtggcggtcgttatttctagtagattgcgggaactggatcgcagcatagaagaagcagcgatggatctcggtgcgacgccgctgaaagtgtttttcgtcattacgctaccgatgatcatgcccgcgatcatttctggctggttactggcttttactttgagccttgatgatctggtgatcgccagctttgtttccgggccgggagccaccacgttaccgatgctggtcttttccagcgtgcggatgggggtgaatccggaaatcaacgccctggcaacattgatcctcggcgcggtcggaattgtcggatttatcgcctggtatctgatggctcgcgcagaaaaacagcggatacgcgacatccagcgtgcaagacgtggctgaagacactaaaatttgccaacctggctacataatgccgcgcatgtcgcggcattgttttcatggaagacgaaacgttgggattttttaagaaaacatctagttctcatgctcgcctgaatgtgcctgcgctggtgcaggtggcggcgctcgccattattatgatccgtggcctcgacgtgctgatgattttcaatacgctgggcgtgcgcggtattggcgagttcattcatcgcagcgtacaaacctggagtttaacgctggtctttttaagcagtctggtgctggttttcattgagatctggtgtgcgtttagtctggtgaaagggcgtcgctgggcgcgctggctatatctgctgacacaaatcaccgccgcaagttacttgtgggcggctagcctggggtacggttatccggagctgttcagcattcccggtgaaagtaaacgtgaaatcttccatagcctgatgctgcagaagctgccggatatgctcatcctgatgctgctgttcgttcccagcaccagtcggcggttcttccagttgcaataatgtgtataatcgtcgcccctgatgatgtgaaggtcaatgtatgcagtgcgcactttacgacgcgggtcgctgtcgttcctgtcagtggataatgcagccgattccagagcaactctccgctaaaaccgccgatcttaaaaatctgctcgccgactttccggttgaggaatggtgcgcgccggtgagtggcccggaacaagggtttcgtaataaagccaaaatggtggtgagtggtagcgttgaaaaaccactgctcggtatgctgcatcgcgatggcacaccagaagacctttgtgactgcccgctttatcctgccagttttgcgcccgtttttgcggcgctaaaaccgtttatcgcccgagcggggttaacgccctacaacgtggcgcgtaagcgtggcgaactgaaatacattctgctgactgaaagccagagtgatggaggcatgatgctgcgctttgtactgcgttctgataccaagctggcgcaactgcgtaaggcgctgccgtggttacacgaacaactaccgcagctgaaagttattaccgtcaatattcagccggtacatatggcgattatggaaggggagacggagatctacctgaccgaacaacaggcactggcggagcgttttaatgacgtaccgctgtggatccgtccgcaaagtttcttccagactaatccggcggtcgccagccagttgtacgccaccgcgcgcgactgggtacgacagctgccggttaaacatatgtgggatctgttctgcggtgtggggggctttggtttacactgcgcgacgcctgacatgcagttaaccgggatcgaaattgcaagtgaggccattgcctgtgcaaagcagagtgccgctgaactgggcttaacgcgtttgcaatttcaggcgctggactccactcagtttgccaccgctcagggggatgtgccggagctggtgctggttaacccgccgcgccgcggcattggtaaaccgctgtgtgattatctcagtacgatggcaccgcgttttatcatctactccagctgtaacgcccaaactatggcgaaagatatccgcgaactgcctgggtttcgtattgaacgggtgcagcttttcgatatgttcccgcataccgcgcactatgaagtgctgacgctgctggtgaagcaataaaaaagccgcatgtgcggcttcagattgctgacaaagtgcgcgttgtttatgccggatgcggcgtaaacgccttatccggcctacaaaagcgtgcaaattcaatacattgcatgggccatgtaggcctgataagcgtagcgcatcaggcaattttacctttgtcatcagtctcaagccgcggttgcggctttctgaatcttactgtgggaaccactggtcactgattttttgataagtaccgtcagctttaattgctgccagcgcgttattcagtttttccagcagggctttgttatccggacgtacagcgatgcccaggccggtgccaaaatattgcggatcggtcactttctcagtagcaacaccaagttgtggattggttttcagccattcgtttaccaccgctgtgtcaccaaataccccatcaatacgaccatttttcagatcgataaaggcattctgataactgtcataagagacagttttcacttccgggtgctgatcctgaatatatttctggtgcgtagtaccgttttccatcccaatacgtttgcctttcagatcggcaaacgttttgtaggtatcttttttggcaatcacgacggcactgttttcatagtagggcgtggtaaagcttacctgtttgctacgctccggggtgatatccataccggagattacggcgtcatattttctgaatttcagggacgggatcaggctgtcgaacgcgtgattagtaaaagtacattctgcctgcatttgtttgcacaaggcttttgccagatcgatatcaaagccgacaatctcattattagcacctatagattcaaagggtggataggtggcactaacgccaaaattgattttctctgcggcagaagcaccgaaagtaaaggaagcaagtaaagcggcaagaactaactttttcatgatggaactcccgtctgtcaatcttatgatttttggccgtgtctgcggcatgggataacaatgccatcaagtgaatttatatgcaataaacatgattaaataatttaaatgaaataaaaaagacggacaacttagtgggttgtccgtcttcattataagaatttatgcactatgtaggccggataaggcgtccccgccgcatccggcacaggcaccgtgctgatgtctgatgcgacgctggcgcgtcttatcagacctacaaaaccccccggcgaatgtacgcagccacattaatttcgccgttcgaatgccagcgctttgcgctcgatcagacgcatcatcagcgtcagcaggccgttaacgaccaggtaaataatccctgccgcaccgaacaccattacatcgtaggtgcgtccgtacaacaactggctgtatcccatcacttccatcagcgtaatggtgtatgccagagaggtacttttgaataccagcaccacttcgttggaataagaagagaggctgcgtttaaaggcatacggcagcaggatcgccagcgtatcttttttgctcattcccagggcgctacaggactgccactgaccttccgggatcgcacgaattgcaccgtaaaacagctgcgtggtatacgccgcactattcaggctcaacgcaatcagcgcacataaccacggttcactcaacaaatgccacagtgccggatactcctgcaaagtcggaaactggcccggcccgtaataaatcaggaagatctgcaccagcagcggcgtaccggtaaacagcgtgatataaccccgcaccagccacaccagcaccggcgttttcagcgtcaggatgatggtaaaaatcaatgccagaatcagtgccacaatcaggctggcaacggttagcgtcaggctggtgtgtagccctttcatcagttcgggtaaatactcaaacattagctgggcctccgctcaaaacgtgtcgcgcgcaggtcaatgcgtttgagaatgtactgactgagcagggtgatcaccaggtaaatcgccgccgccacaatgtaccaggtaaatggttcctgggtacgagtagcgatgctttttgtttgcagcattaaatcattcacactaatcaaactgaccagcgcggtatctttcagcagcaccagccactggttaccgaggccaggcagcgcatgacgccacatctgcggcatcaccagacggaaaaagatagcgcttttgctcagccccagcgcctgaccagactcccactgacccaccggcaccgctttcaacgcgccccgaagcgtttggctggcataggcggcatacagcagactcagagcgatgacaccacaaaggaacgggctaacgtcgaagttctcaatgtccatctgcactgggatctgcacgaacccaagattgatagtgaagccatcgctaagcgtcagcagcagctggctggagccaaaatagataaacagcaccaccagaatttctggcaggccacgcagaatggttaccagcgcactacctgcccacgcgacaggacgccattttgcgctctcccataccgcaaagaacatcgccagcgccagcccgacaatcaatgcacaaacggcaaggccgacggtcatcccggcggcgcttgctaaaggaaaaaattcattcatcaggaattacttctggaaccatttgttgtagatggtttcgtaagtgccatctttcttcactttttccagcgcagtgttgagtttctgctgcagctcagtgttgccctgacgtaccgcgatgccgaggccagtgccgaagtaatctttatcggtcactttgtcgcccaccgccgccagtttcgggttatctttcagccactcagtgaccactgcggtgtcaccgaagacgccgtcgatacgcccgttttgcagatccagttttgcgttctggtagctgtcatacggaacggtagtgatttccgggtgcttatccataatgaatttctggtgtgtcgtcccgttctgtacgccgacttttttgcctttcagctgatcaacactggtgtatttgccttgctgacccacaaacagggcagagttgtcatagtacggggtggtaaacagcacctgcttttcacgctccggagtgatatccatgcccgccatcacggcttctacgcgacggaatttcaggcttgggatcaggctgtcaaacgcctggttagagaaagtgcaggttgcatcaatctctttacacagcgcttgtgccaggtcgacgtcaaaaccaacgatctggttgtttgcatcaatgctttcaaacggaggataggaggcttcggtagcaaaacgaatggtttcggcagctgtggcggaaagactaaaacctgcaattaacgcggcaatcagaacttttttcattgttgttatcccgaatcttagtgagagagatagtttttaaatgcttcggtttgcggctcggtaaagcagctcgcgtcgccttgttctacgatatgaccattttccatatacaccactcggctggcggttttacgcgccacttcaacttcgtgggtgacgatcacctgggtaatattcgtttctgccagctcacgaatgatgctgacgatttgtgccgtaatttccgggtccagtgcggcggtcggttcatcgaacagcagtacctgcggttccatcatcaacgcacgggcaatagcaacacgctgctgctgaccaccagaaagatgcagcgggtaacgatcgctataaggtttgagacgcagacgttccagcagtttttctgcacgggccagcgcctgatctttactcaaccccagtacacggcagggcgcttcaatcaggttttgctgcacggtcagatgcggccacaggttgtattgctgaaacaccatgccaacgttacgacgcaaatcgcgaatcgctttgtcagagggtgttttggtgaaatcgaaatggttgcctgcaatgttgagcgtaccggagcgcggcatctcaagcagattgagtacacgcagcaggctgcttttacccgcgccgctggggccaagtaacaccagcgtttcgccctgtgggcaatccagcgtgatatcgaacagcgcctgatgcgcgccgtagaagcaattaatgccgtttaattgaatactcattgacactcgtatactggcagtctgatagctattgaggtcgaagatagtacctttgacagaataattatgcaatatttctgctttaaaagttaaaagcaaagcgcattattcaataaacatagcacaaaataacgggggcggtggtcggcgagcataaatgtcggcattcctcacgaaatgccggacaatttacggggtttattggttgatcaaggcgttagcgattctcgatggactgacggagcgtacccgccgtggcatgaacgctaccgcctaagtaacgcacatcgtcgatgacccaacactggccttcctgaatcattaacacttcatcctgccaaccctggtcaccctgtttgagatccacgcgcaatggaatgttacgggcatcacgattagggatagtgcttgcactggcaacgtgggcgctatctggcaaggtggttcgactggagaatggatcgttggtcagtagttcccgatggttattatcccgggaggcatcgctaagcagtgtcgccagtttgtcgctcagataagggcgcaaggcggtgatgtcgttgctgcggtgcaaaatgcggtagtcataaaattgctgggccacgttatccgggcctccttcaacgcaaggaccactgcgtgtgccgttatctttataagctggagtgactgtggtgcaggcactgaggagcagtgcgcaggggataagcattgtcaatttgctgtagcgcataatgatttccttataagcgatcgctctgaaagcgttctacgataataatgatatcctttcaataatagcgtatcagtctgataatgcttttgagatcgaaggcttagcaaacaaggagatcgatcatgcaattttctacaaccccaactctggaaggccagaccatcgttgaatattgcggtgtggtgaccggcgaagcgattttaggtgccaatattttccgtgatttctttgccggtatccgcgatatcgttggcggacgttccggtgcgtatgaaaaagaactgcgtaaagcacgggagatcgcctttgaggaattaggctcccaggcgcgggcgctgggggccgatgccgtcgtcggtattgatatcgactacgaaacggtcgggcaaaacggcagtatgctgatggttagcgtcagcggtacggcggtgaaaacgcgtcgatgagaagattcttctggctggtcgctgccgctctgttattggcagggtgtgcaggcgaaaaaggcattgtcgagaaagagggatatcagcttgatacccgacgccaggcgcaggcggcgtatccgcgcattaaagtgctggtgatccactacaccgcagatgattttgatagcagcctggcgacactgaccgataagcaggtcagcagccattatctggtccctgcggtaccaccgcgatacaacggtaaaccgcgcatctggcaactggtgccggaacaagaactggcctggcatgcggggattagcgcctggcgcggggcaacgcgccttaacgacacctctattggcattgagctggaaaaccgtggctggcaaaaaagcgccggagtgaaatattttgccccgtttgaaccggcacagattcaggcgcttattccactggcgaaagatattattgcccgttatcacatcaagccggaaaacgtagtggcacatgcggatatcgcaccgcagcgcaaagacgatccggggccattatttccctggcagcaactggcgcagcaggggattggtgcctggccggatgcgcagcgggttaacttttaccttgccgggcgcgcgccgcacacaccggtagataccgcgagtttgctggagcttttggcgcgctacggttatgacgttaaacctgatatgacaccgcgcgagcagcggcgcgtgattatggcattccagatgcatttccgcccgacgttatataacggcgaagcggatgcagaaactcaggcgattgccgaagcattgctggagaaatacgggcaggattaacgcggcagttttccgtggtcgcgtagccaggcggcagttttctcgataccttcatccagggtgatgaccggctgataacctaactcttcctgcgcacgcgtaatatccagcgtaaagtcaaaattcaacttggagacgccgtagtgggtcagcggcggctcttttgcactcttgcggcctaaacgctccatgctgcgggcgatcatatccagcatcgggtaggggacggaacgaatacgacagtcaatattcaactcgtcgatcagcttctgcacgatgctgcgcagtgtgcgatgctcgccgttggtgatgttgtacacacgcccggaaggtagcttatcgcaggcttcctggcttgccagccacattgcgtgcacggcattttcatagtaggtcatatcgaccagcgcactgccgccatgcggtaacagaatactgccgtagtggtgcatcatatgcgccagacggggaataaagactttatcgtgcggtccgaacagactttgtgggcgcagaatagtaaagcgcgtttgtggattcgcctggctaagcatattgatcacttcttcgctggctgctttgctgcgggcaaactcgttggcgaagcggtgagggcgaaaatcttctttaatatcgcgatggtggtgataatcgaagtacagggagggggaagagatatgaataaagttacgcacaccccaggcgacagcccattcacccaggcggcgagtggcgcgaacgttagccagatcgaaagcctgttgtgtcccccagggactggtaaagctggagcagtgccacagcgtatcaatgcccgcgagcatcactttagcttgactactaaccagctcggtcagatccgccggaacaaactctgcgcccattttttccagcaatttgcccattgcctcgttgcgaccggtcgctcgcacgctgatgcctttctggcataaaaactctaccgcgtttcgacctaagccgctggtggcgccggtaaccagtaccttcatatcaatccactgttgttgagaaaataacgtgcgcattcttccgtgatttcccccatgatgcaatgggaaacatgaaagaataacgcaggttttgtcgattaatctgtgctttgttctgccagtctggcgatttgttttgccattccgcgaaaaataaacagatgcgcggggatcatcaataaccagtaaaacagccccggcataccgtgcggatgccagaaagcgcggacatcgatagtacgatagtcgcctttatcttccaggctaaaacacagtcgtcccagccccggcgctttcatgccaaataacaacgtaagttgtttttccggttcaacgacaatcactttccagctatccaccgcatcgccagtctgtaaatattcgcgctccgggcggcctttcgccagcttatgaccgatcgcgcggtccatcaacgcccgtgtctgccacaaaatattgccaaagaaataacgctctttaccgccgatttggttcactacctgccataaagcagcaaggctggcggacgttttaacggtaaaccccgcctgtttggcaaaataaccgtactccggtcgccagcgggcaaaggcctgagcgtcgtagccccagtcgctggagttgaccagtttttcctcctctttcaacgtgctacgtaccgcgtcatcgaaagcgatcagccgttgtgggatgagtgcacgtagcgcggtatcatccgccagcagatcgtgtttcagcccctgaatcaacgccctggcggtggtgggcggtacggaagtaatcacattgagaaaccacacgctaatccagcgggtggggagggggatggggatcaaccagcggcgcttaccgctcaccgccataaaatgttcaaactgttgctgataactgagcacctctggtccggcggcttcgaagatgcggtgttcgctggccggatgatctaacaacgcaaccagatagtgcagcaagttttccagcgcaatgggcgtggtgcgactacgaacccagcgcggaggcgttaagactggcaggttgtagaccatatcgcgcatgacttcgaacgccgcggaacctgcgccaacgataattccggcccgcagttcggtcacgggtacattcgcttcacgcagaatgtccgccgtagcctgacgagcacgcagatgatcgctctgctcatgtggcggggcctgcaagctactaagaaagattaattgcttaactggtacttcacgtagcgcatcgcggacgttgagagccacctggcgctcctgagcgataaaatcgccgccttcgcccatgctgtgcaccagaaaatagaccgtatcgatatcctgcaacagggccggtaggttatccggccagctgagatcgactttatggcaactgacgtttgccagttgcagctttgcaagcctgtcgacatgacgtgccgccgccaggatctgatgcccttgctggctgagtgtgcgcaccagatgctgaccaatgtagccactggcaccgagaactaaaatgcgttgcggcacgtctctctccttaacgcgccaggaatgcacgccagtgggcggcgacttccgccagttgttcgcggctgacgtcaagatgcgtcaccaggcggacaatcgggctggcgttaatcagcacgtttctcgctttcatgtattcgcctaacgcggcagcattttcttccccgacgcgaacaaacagcatattggtgtcctgacgcatcacatccgcgcctgcttcacgcagctgctccgccatccaggcagcgttgtcgtggtcttcctgcaagcgcgcaacgttatttttcagggcatatatcccggcggcagccagaatgccggactggcgcatcccgccacctgtcattttccgccagcgaatggcacgtttaatgtaatcacgattaccgacgagtaaactaccgactggcgtcccaagacctttgctcaggcaaatggtgaagctatcacaatattgcgtgatctctttcagttcgcagccgtaagccaccacggcattaaagatgcgcgcaccgtcaacatgcagcgccagattgcgctcgcgggtaaattcccatgcttctttcaggtattcccgcggcaacactttgccgttgtgggtgttttccagactgagtaatttggtgcgggcgaaatggatatcgtcgggtttgattttcatcgccactttatccagcggtagcgtgccgtcggcagccgcgtctatgggttgcggttgaatactgcccagcaccgccgcgccaccggcttcaaacagatagttatgcgcggcctgaccgacaatatactcttcgccgcgttcgcagtgactgagcagagcgaccaggttggcctgagtgccggtaggcagaaaaatggcggcttctttaccggaaagctctgctgcgtagtcctgcagagcattaacggtagggtcgtctccgtaaacgtcgtccccaaccggggcggccatcatcgcttcgagcatggcgcggcttggtcgggtaacggtatcactgcgtaaatcaatcatggcatgtccttattatgacgggaaatgccaccctttttaccttagccagtttgttttcgccagttcgatcacttcatcaccgcgtccgctgatgattgcgcgcagcatatacaggctgaaacctttggcctgttcgagtttgatctgcggtggaatggctaactcttctttggcgaccaccacatccaccaacaccggaccgtcgatggagaaggcgcgttgcagggcttcatcaacttcagacgctttttctacacggatacccgtaatgccgcacgcttcggcaatgcgggcaaagtttgtgtcgtgtagttcggtgccgtcagtcaaatagccaccagctttcatctccatcgccacaaagcccagcacgctgttgttaaagacgacaattttcactggcagtttcatctgcactacactgaggaaatcgcccatcaacatgctaaaaccgccatcgccgcacatggcgaccacctgacgttctggctctgtcgcctgcgcacccagcgcctgcggcatggcgttagccatgctaccgtggttaaagctacctaacaggcgacgcttgccgttcatttttagataacgtgccgcccacaccgttggcgtaccaacgtcacaggtgaaaatagcgtcatcggcggcaaaatgactaatttgctgcgccagatattgcgggtgaatggctttctcgctcggtttagctaaatcgtccagccctttgcgggcgtcgcggtaatcttccagcgctttatccagaaacttgcgatcggctttttcttccaccaatggaagcaatgcacgcagagtgctcttgatatcgccgaccagtgccatatccaccttgctgtgagcgccgatgctggctgggttgatatcaatctgaatgattttggcatcggtcgggtagaaggcgcggtagggaaattgcgtgccgagtagcactaacgtgtcggcgttcatcatggtatggaaaccactgctgaagccgattaacccggtcattccaacatcatacggattatcgtattcgacatgttctttaccgcgcagggcatgaacaataggcgctttaattttcccggcaaactcaactaactctttatgcgcccccgcgcagccgctgccacacatcagggcgatattgctggaataacgcagcagttgcgccagtttgcgtaactcttcttcttccggcgtcacgactggttgtggcgcatgataccagtgcatggttgccccttctggcgcaggttttaacgccacgtcgcctggtaacacgacaacgctaacgccacggttaagcaccgctttgcgcatggcaatcgccagtacttgtgggatctgctccgggctggaaaccagctcgcaatagtgactacattcgcggaatagctcttgtgggtgggtttcctggaaatagccgctgccaatttcgctggagggaatatgagcggcaatcgccagtaccggaacgtgattgcggtggcaatcgaacaggccgttgattaagtgcaggttgccggggccgcagcttccggcgcagaccgccagttctccgctaagttgtgcttcagcgccagcggcaaaggccgccacttcttcgtggcgggtggacatccactcgatggtgcccatgcgattaagactgtcactaagaccgttcagagagtcgcctgtgactccccagatgcgtttcacccctgcgctttcgagtgttttggcgatataagctgcaaccgtttgtttcatggttctccatctcctgaatgtgataacggtaacaagtttagttcatctgacggagggggaagggatgggagagaaaggaggcactaacggttaaatagcccgatgaaaggaatatcatcgggcataaggcgattatgcgagaaccaaatccccctgcggatggcaggagcaggccagtacgtaaccttcagcgatttcggcgtcggtcagcgtcattgtgctgctcaccgtatattcaccggaaaccacttttgtcttacagcagccgcaaacacccgcacggcaggcagcgacaaccggaacgttattgctttccagcgcctccagtagcgtggtgccaaccggggcgtaaaattctcgtgccggttgcagtttggtgaatttcagaccgctggtcgccgcttctgctactggggtgaagaatttctctttaaagaaacgcgtcacgccgagcgctttcacttcctgctctacccaatccatatacggagccgggccgcaggtcatcacggtacgactagctaagtcaggtacacctgccagcagttcgcgagtgagacgaccagcgataaagccttcggtaacgttattttctgccaccagcgttaccggatagttacgccactcatcggcgaaaataacatcctgcggcgtacgcacgttgtagatcacccgcacatcggcctgtggacggttcttcgcaagccagcgacgcatgctcataatcggcgtgacgccgcagcctgccgccagcaacaggaatttatcttctgctttatcgtcgcaggtaaattcccccatcgcgtcgctaagccagagataatcaccgcgttttacatcgcgcgtcagccactgggagccgacaccgtcatcaatccgccgcacggtcagggtgatatattcactcacgcctggcgtggaggaaatggtgtaagcacgcagcgtttccgcactgtttcgcacgctgaccagtgcatattgcccggcgcgatatgggtagtaatcgtggcaaatcagggaaatcgtccacacatccggcgtttcttgcgtaatgtgatgaacctgcatccgccacgggcattgattcgttggcatcgtcatcgacaaactccttacgcgctcaacagttgcttcatgtcttcttcaacagtggtgatagaacgcaggccgaatttctcgttcagcaccgccagcaggtctggtgtcaggaaaccaggtgcagtcgggccggtgacgatatttttcacgcccagagaaagcagcgtcagcagaatgacgatcgctttctgttcaaaccaggagagcaccaggctcagcggcagatcgttgacaccgcagcccagtttctctgccagagtgacagccagaataatcgcactgtaagcatcgttacattgacctgcatctaccagacgcggcagaccttcgatatcgccaaactcaagtttgttaaagcgatatttaccacaggcgagggtcaggatcaggcagtcatccggcacgctggtggcgaaatcggtgaagtagtggcgctcgccgcgtgcgccgtcacagccaccaagcaggaagatatgacgcagtttttcacggctcaccagatcaatcagcgtatcagcagcgccaagcagcgtctggcgaccaaaacccacggtgataaggtgcggaatttcgctgtacgggaagcctgccatctgttgcgcctgggtgataaccgcagagaaatcatcaccgtccagatgacgcacgccaggccagccaacaatgctgcgggtccagatacgatcgtcataagcgcctacggttgggtcgatgatgcagttgctggtcatcacgatggggccagggaaacgagcgaactccacttgctgattctgccagccgctgccgtagttaccgaccagatgcttgaatttacgcagctccgggtagccatgcgcaggcagcatttcgccgtgggtgtagacattaacgcccgtgccttcggtctgttccagcaggttgtagagatctttgagatcgtgaccggaaatcagaatgcatttacccgccgtcgctttgacgttgacctgggttggcgtcgggtgaccgtatttaccggtttcgcctgcatccagaatgctcatcactttgaagttcatctggccgatttccatactacactcaagaagcgcgttcatatcggcaggccaggtccccagccacgccatgattttatggtactgggcataaatatcgttgtcgtattgaccgagaacatgcgcgtgttccatataggccgccgcacctttcaggccatacaggcacagcagacgcaggccgagaatgttttcgccaatcgccgctttatctttgttaggggtaaattctgctgcctgacgttgcagctcgccgagatcgtcgctcaccagttgcaggtcagccatcgggttatcgacgcgcgcgttggcatctacagccaggcattgcgctttcagcgcctcgcgcagggcaatcgcttcacgagcgtagccgacaatacgcggagaatcgaagttaacgttggtcagggtactgaaaaaggcacgtggcgcgaagctgtcaacatcgtggttgatgatgccgtattcacgcgcttttaccgcccaggcagaaagcccttgcagcgccgcgatgagtaaatcctgaaggtcagaagtttccgccgttttaccacacatcccctgcgcgtaactgcagccgtttcctgccggagtacggatagtttgttcacattgcacacaaaacatgatcacaccttttaaagttatatttaatatacatgtttaaggttaagacgcttaacgcggggataaaagggatttttcatgcaactttaagggagattgatttagcgcaattttggcggcagggatctaccgccagagaggtattacgcagagaaaaaggcgatgaggatcggcactaacaggctaagaataaaaccgtgaacaattgccgccgggaccatatccagcccgccagtacgttgaagaacgggcagggtgaaatccatacttgtggcaccgcataagcccagtgcagtagagcggctgcggcgaatcagcccagggatcaacataatagcaatcagttcacgggccagatcattaaaaaacgccgcgctcccgattaccggaccaaaagattcggtcaataaaataccggaaagagaataccagccgaaaccggaggccattgccagcgcggtattgatggggagatcaagaataaaggcgttaattaaaccaccaattaaactactgacaaccaccaccacggcgacaatcattccccggcgattaaggacaatctgctttaaggtcatgccattattgcgcaactgaataccaacgaggaaaagtagcaaaattaacgtgtattcactggcttcggtcgcgtgttgtaagaaagccagtccacttagaccaatggcaaaaccaatcactactacgccgcacagttttaggctctccagcgccatcgcaatacggctcgggagtttttcttgctgatggtggttgcgccacggcaggcctcgctccagccacatcagggcggcaatattacacagtaaaataacggtaatactgacggcagaataatgcagaatcgccaacaggttactggcgaggttatcgagaaacgccagactgatacccataaaaaagagaataaggtaaaccatccagcttaatagctgattaataacttttaacgcagcttgttggcgaagcggaatgaggtaacccacaatcaggggaaccagaatgattaacagcccagaaaacatgaaaacccagtccttgcaaagatgaagtcgaaatgcgcgatgacacactactgaaagcggaaggacgagtaaagttgcaattaaaaggaaatgttatgcataaggagcagtagagtattcgttttcatttaaagatattcttgcgctttaattacaaactgcaccgatgttggtggcgtcaaaatcgccgaggcgttccctgaaggccggggcagcccacatggatgtgggctgagggcgcgttttacagggatgttacctcgcgcccgacccggtagccgtaagggataagtcgagggcaccgcgcagcggcgattttgttcgccagagcccgggggtgcagggggcggcggcgattggccgccccctgcgcgctccttgcgccagtggcaatatgttgcttagctcatgaaaggagcgcaacaagatgatgaatcaacatataacaacatcttaaaaaaaggcctgacattacgccaggccttctgcgttaattaatcacgcttttccagcagggtccggtaaatcagaccaccgataatgccgccgacaattggcaccacccagaagaaccacagttgttctaatgcccagccgccctggaagatagcaaccgcggtgctgcgcgccgggttaacagaagtgttagtcaccggaatactaattaagtgaatcagggttaaggccagaccaatagcgatcggcgcaaaacctgccggcgcgaatttgtcggttgcgccgtggatcaccaacaggaaacctgcactcaataccagttcaactaccagcgcggaaagcatggaataaccgcctggactatgctcgccataaccgttagaagcaaaaccgctggctgccgcgtcaaaacccgttttaccactggcaattaaatacagcagcgccgctgcaacaataccgccgacaacctgggcaattacgtagccaacgacttcttttgccggaaaacgtccgccagcccataaaccaatagtgaccgccgggttaaaatgaccaccagaaatatgaccaacagcaaaggccatcgtcagaacggtcagaccgaacgccaacgccacgccggcaaaaccaatgcctaattccgggaagcctgcggccagtacagcactaccacagccaccaaaaacaagccagaaagtaccaaaacattcagctgctaattttctgaacatatccaccacaattaaaaattgaccctgtgaaaaatatggtcgttttatagggtcgtcgtaaaaaagtgacgacggaaataatgcgcggctattttaaaaacgaaggcgagtcattcaccagataaataaatccagtaaatttgatttagggcaacagcgggttgccccatatagtcatttgtctgattgacagtgtagtgcacgcaaaagatttaatcctttaggcgtaataaaaaataatttatcatgctaattatttgattttgttgtttttgcagacttatcagcaagagggagtataacgcgattattcgctcatttttcagacatttgccatgcttaaatgtgatgtcatcacgtattagcaaggcctttcccgttatactgccagcgtaaaggataagtcacatatttctggaggggatatgattcttgagcgcgttgaaattgtgggttttcgcggtatcaaccgtttgagcttgatgctggaacaaaacaacgtcctgattggggagaacgcgtggggtaaatccagcttgctggacgccttaactctgctgctaagcccagaaagtgatctctaccattttgagcgcgacgatttctggttcccgccgggagatatcaacgggcgagaacatcatctgcatattattttgaccttccgcgaaagcctgccaggccgacatcgggttcgccgttatcggccgctggaagcgtgctggacgccatgcaccgatggctatcaccgtattttttatcgtctggaaggggagagtgcggaagacggcagcgtgatgacactgcgcagttttctcgataaagacggacatccgattgatgtcgaggatattaacgatcaggcacgccatctggtgcgtttaatgccggtgctgcgcttgcgtgatgcccgttttatgcgccgtattcgtaacggcacggtgccaaatgtccctaatgtggaagtcaccgcgcgccagctcgatttcctcgcccgtgagttatccagtcatccgcaaaatctctctgatgggcagattcgtcagggactttccgcaatggtacagctgcttgagcattatttctctgagcagggggccggacaggcgcgatatcgtttaatgcggcggcgagccagcaatgagcaacgaagctggcgctatctggatatcatcaaccggatgattgaccgacctggtgggcgcagctatcgggttattttgctcggcctatttgctactttgttgcaggcaaaaggcacattgcgactggataaagacgcccgtccattgttgctgatcgaagatccagaaacccgtttacaccccattatgcttagtgttgcctggcatctgttgaatcttctgccattgcagcgcattgccaccaccaacagcggtgagttgcttagcttaacgccggtagagcatgtttgccgactggtacgtgagtccagccgcgttgccgcctggcgtctggggccgagtggcttgagtaccgaagatagccgacgcatatcctttcacattcgttttaaccgtccgagtagcctgtttgcacgctgctggttgctggtggaaggggaaacggaaacctgggttatcaatgaactggcgcgtcagtgcggacatcattttgatgccgaagggatcaaggtcattgagtttgcccagtccgggctaaagccactggttaaatttgcccgccgaatggggattgaatggcatgtactggtcgatggcgatgaagcagggaagaaatatgccgctacggtacgcagcctgttgaataacgatcgggaagccgaacgagaacatttaacggcgttaccggcgctggatatggaacattttatgtatcgccagggattttccgatgtgttccaccgcatggcgcaaatcccggaaaatgtaccgatgaatctacgcaaaattatcagcaaagcgatccatcgctcttccaaacccgatcttgccattgaagtggcaatggaggcaggacgtcgtggtgtggactccgtaccgacgctgctgaaaaaaatgttcagtcgcgtgctgtggctggcgcgcggtcgcgcggattaaccgcgaaacatcgtggccatttgtggctgaatagcgtcgagcatctcatagcgccgacggtattcagcccgttttttactggcgatttcggcaatctcttttcgtgctatctgtgctggaaggcggtaatggcgttcagcatcacatacgccgccaacgctttcccagaaagcgttgtaatcagcgtggatcttgccttctttatcgcgataacgcaggctgcggtaaatatgcgtttcattgctgacggcaataatctgctctacctgcaaacgttgggcaaacagacaggccgcttccatcacgaggcgtttgggaaatagcccgtggcaggctttcgtcgcattctggatttcctgatgtggaatttcccattttgcgccttgcagtccgccaataaacatcgttcttttcccctgatattcacacagggtaaacgtgatctctgccagaggaataccttcgctgttgcggaacaggattgtgctgtcaccttctttatccatactgatcatcatggtcagctcaagcgtgaactgctcgccgtttttgccttccagcttcgccagttgcagcccgggggtattcaaatataagctgaattcttccgcgctcatacattcgcggagtaacgcataatggtaacgtaacgcctccagcaattgcttacggctaagattcgccgcaaggtaagggcgatgcagacgcacaggcagtcgcggctggcgcgttaacaatacattgagattaggccagtgggaaagttcgttcatccactcaacgcttaaacgcggcataatcaagctgcgcagcaaaaatttctggcgaaaactacggcgatgccagaatttacccggccgacactgtccacgtgccagactaagaaaaagactcaggctgctgagagattcagatggcgtaaaggtccgttcagttagctggctcatattcatgaaatcaatggttatacatggcgtgcttttcaccattgcgtatcttaaccaaacatcaatagtgtgattactaacgtaaattttagggttttgttgatatttcgttgaagttaatgacccggattggcatatggagtattcagaaaatttatgaaaaagcggaaaaccgtgaagaagcgttacgttattgcgctggtgatagtcatcgccggactgattacgttatggagaattcttaacgcacccgtgccgacttatcagacgctgattgtgcgccccggtgatttacagcaaagcgtgctggcgaccggaaagctggacgcgctgcgtaaggttgatgtgggcgcgcaggtcagcggtcagttgaaaactctgagcgtggcgattggcgataaagtaaaaaaagaccagcttttaggggttattgatcctgaacaggctgaaaaccagattaaggaggtcgaagcaacgctgatggagctacgtgcgcagcggcagcaggcggaagcggagctgaaactggcgcgggtgacgtattcccgtcagcaacgtctggcacaaacgaaggctgttagtcagcaggatctcgacaccgccgcgacggagatggctgtgaaacaggcgcaaattggcaccattgacgcgcaaatcaagcgcaatcaggcttctctcgatacggctaaaaccaatctcgattacactcgcatcgttgccccgatggccggggaagtcacgcaaatcaccactctgcaaggccagacggtgattgccgcacaacaagcaccgaacattctgacgctggcagatatgagcgccatgctggtaaaagcgcaggtttctgaagcggatgtaatccacctgaagccggggcaaaaagcctggtttacggtgcttggcgatccactgacgcgctacgaggggcaaatcaaggatgtactaccgacgccggaaaaggttaacgacgctattttctattacgcccgttttgaagtccccaaccccaatggtttgctgcggctggatatgactgcgcaagtgcatattcagctcaccgatgtgaaaaatgtgctgacgatccctctgagcgcgttaggcgatccggttggcgataatcgttataaagtcaaattgttgcgtaatggtgaaacacgcgagcgtgaagtgacgattggcgcacgtaacgataccgatgttgagattgtcaaagggcttgaagcgggcgatgaagtggtgattggtgaggccaaaccaggagctgcacaatgacgcctttgctcgaattaaaggatattcgtcgcagctatcctgccggtgatgagcaggttgaggtgctgaagggcatcagcctcgatatttatgcgggtgagatggtcgcgattgttggcgctagcggttccggtaaaagcaccctgatgaatattctcggctgtctggataaggccaccagcggcacctatcgcgtcgccggtcaggatgttgccacgctggacgccgatgcgctggcgcaactgcgccgcgagcatttcggctttattttccagcgttaccatttgcttagccatttaaccgccgagcagaacgttgaagtacccgccgtctatgctggtcttgagcggaaacagcgactgcttcgtgcccaggagttgctgcaacggctggggctggaagaccgtacagagtattatccggcacagcttagcggtggtcagcaacagcgcgtcagcatcgcgcgggcattgatgaacggtggtcaggtaattcttgccgatgaaccaaccggcgcactggacagccattctggcgaagaggtgatggcgatcctgcatcagctgcgcgatcgtgggcatacggtgattatcgtcacccacgatccgcaggtcgctgctcaggccgagcgggtgatcgaaattcgcgacggcgaaattgtgcgcaatcctcccgccattgaaaaagtgaatgttactggcgggacggaacctgttgtcaacacggtgtctggctggcggcagtttgtcagcggttttaacgaggcgctgacgatggcatggcgggcgctggcagcgaataaaatgcgtactttactgaccatgctggggattattatcggtattgcgagcgtggtttccattgtcgtggtgggtgacgccgccaaacaaatggtgctggcggatattcgttctattggtacgaatactattgatgtctatcccgggaaagattttggcgatgacgatccgcaatatcagcaggcgctgaagtacgacgacttaatcgccatccaaaaacaaccgtgggtcgccagtgccacacctgccgtcagccaaaacctgcgcctgcgttataacaatgttgatgttgctgccagtgccaatggcgtgagcggcgattattttaatgtctatggcatgaccttcagtgaaggaaacacctttaatcaggagcagctgaacggtcgtgcgcaggtcgtggttctcgacagtaatactcgccgccagcttttcccccataaagcagatgtggttggcgaggtgattctggtcggcaatatgcccgccagagtcattggtgtggcggaagaaaaacagagcatgtttggtagcagtaaagtgctgcgtgtctggctaccttacagcacgatgtccgggcgagttatgggccagagctggcttaactccattactgtcagggtgaaagaaggatttgacagcgccgaggcggaacagcaactcacgcgtttacttagtctgcgccacggaaagaaggatttctttacctggaacatggacggcgtcttgaaaactgttgaaaagaccacacgtactttacaactgtttctgacgctggtggcggtgattagcctggtggtgggcggtattggtgtaatgaatattatgctggtgagtgtgaccgagcggacgcgggaaattggcattcgcatggctgtaggtgcgcgagcaagcgatgttttgcaacagttcctgatcgaagccgtactggtttgcctggtcggtggcgcgttgggaataacactgagtctgttaattgctttcaccttgcagcttttcttacccggctgggagattggttttagtccgttggcgctgctgctggcgtttctctgcagcacggtcaccgggattttatttggctggttacccgcacgaaatgcggcacgactggatccagtagatgctctggcacgagagtaatttttgagataaaaatgccagccgatcgggctggcattttgcctttaggatgtacacaatgagacagaagagttatgcgactgccgcttctacttcgacgggcacaataacactggcgtgattgccttttggcccctggtggacatcaaactgaacggattgtccagcttttagcgttctgtaaccatccatctgaatggtggaataatgagcgaaaatatcttcgccgccgccttcagggcagatgaaaccaaaccctttggcattgttgaaccacttaacagtacccttttccatgcttcgacatccttcgcaaatcttatacaagtaagatggaataaaccggggtcagagagggggctgttcaaaacctcgccaactctagaaatacaatttagagaattagggcgagccgtcaagcatttgacaggggacaaggggcaggtatgaatcaaaaatttgaagcagttaacgctattgacaggaatgtgacagatgtcgctgatgccaacgatagatgatagttatctatcatgtggagtagattggtcaggcaaataagctcttgtcagcggcagggcgttctgccgataaccgtaaccgaagatgataactgacaatgggtaaaacgaacgactggctggactttgatcaactggcggaagaaaaagttcgcgacgcgctaaaaccgccatctatgtataaagtgatattagtcaatgatgattacactccgatggagtttgttattgacgtgttacaaaaattcttttcttatgatgtagaacgtgcaacgcaattgatgctcgctgttcactaccaggggaaggccatttgcggagtctttaccgccgaggttgcagaaaccaaagtggcgatggtgaacaagtacgcgagggagaatgagcatccattgctgtgtacgctagaaaaagcctgaatgcaggcataaaaattgggggaggtgcctatgctcaatcaagaactggaactcagtttaaatatggctttcgccagagcgcgcgagcaccgtcatgagtttatgaccgtcgagcacttgttactggcgctgctcagtaacccatctgcccgggaggcgctggaagcgtgttctgtggatttggttgcgctccgtcaggaactggaagcctttattgaacaaaccacacccgttctgcctgccagtgaagaggagcgcgacacacagccgacgctgagttttcagcgtgtactgcaacgtgcggtcttccatgtccagtcctccggtcgcaatgaggttaccggtgcaaacgttctggtcgctatctttagcgaacaggagagccaggcggcatatctgttgcgtaaacatgaagtcagccgtctcgatgtggtgaactttatctctcatggcacgcgtaaagacgagccgacacagtcttctgatcctggcagccagccaaacagcgaagaacaagctggtggggaggaacgtatggagaatttcacgacgaacctgaatcagcttgcgcgcgtgggcggaatcgacccactgattggtcgtgagaaggagctggagcgtgctattcaggttctctgccgtcgccgtaaaaacaacccgctgctggtgggggaatctggtgtcggtaaaaccgcgattgcggaaggtcttgcctggcgaattgttcagggcgatgtgccggaagtgatggctgactgtacgatttactctctcgatatcggttctctgttagcgggcacaaaatatcgcggcgactttgaaaaacgttttaaagcgttgctcaagcagctggagcaggacactaacagcatcctgtttattgatgagatccacaccattatcggtgcgggtgcagcgtctggtggtcaggtcgatgcggctaacctaatcaaaccgttgctctccagcggtaaaattcgtgtaattggtagcacaacctatcaggagttcagcaacattttcgagaaagaccgtgctctggcgcgtcgcttccagaaaattgatattactgaaccgagcatcgaagaaactgttcaaatcatcaatggcctgaaaccgaagtatgaagcgcaccacgacgtgcgttataccgcaaaagcggtgcgtgcggcggtagagctggcggtgaaatacattaacgatcgtcatctgccggataaagccattgatgttatcgacgaagcgggcgctcgcgcacgcctgatgccggtaagcaaacgcaagaaaaccgttaatgtggcggatattgagtccgtggtggcccgtattgcacgcattccagagaagagtgtttctcagagtgatcgtgataccctgaaaaacctcggcgatcgcttgaaaatgctggtcttcggtcaggataaagccattgaggcgctgactgaagccattaagatggcgcgtgcaggtttaggtcacgaacataaaccggttggtagcttcctgtttgccggccctaccggggtcgggaaaacagaggtgacggtacagcttagcaaagctttgggcattgagcttctgcgctttgatatgtccgagtatatggaacgccataccgtcagccgtcttattggtgcgcctccgggatacgttggttttgatcagggcggtttgctgactgatgcggtcatcaagcatccacatgcggtgctgctgctggacgaaatcgagaaagcgcacccggacgtgttcaatattctgttgcaggtgatggataacggtacgctgaccgataacaacggacgcaaagcagacttccgtaacgtggtgctggtgatgaccaccaacgccggggtacgggaaactgagcgcaaatccattggtcttatccaccaggataacagcaccgatgcgatggaagagatcaagaagatctttacaccggaattccgtaaccgtctcgacaacattatctggtttgatcatctgagtaccgacgtgatccatcaggtggtggataaattcatcgtcgagttgcaggttcagctggatcagaaaggtgtttctctggaagtgagccaggaagcgcgtaactggctggccgagaaaggttacgaccgggcaatgggcgctcgtccgatggcgcgtgtcatccaggacaacctgaaaaaaccgctcgccaacgaactgctgtttggtagcctggtggacggcggtcaggtcaccgtcgcgctggataaagagaaaaatgagctgacttacggattccagagtgcacaaaagcacaaggcggaagcagcgcattaatctgattgttaggtaggttggtcaagtccgtaatctcgaaagaggttacggactttttgtttatggggtggaggaggttcagaccctttttttaatgatgatggtaagttgttgataattagtgctgcgggaaggtaaggataaaaaagggtgctgcaggagaatgggatggttttgctttattaacaacgggctaaacgtgtagtatttgagttcactgccgtacaggcagcttagaaattcacaggtaacatactccacccgcccaccatgttcactgccgtacagacagataaaatgcgaaaaaaaagctcgcactttcgtacgagctcttctttaaatatggcggtgagggggggattcgaacccccgatacgttgccgtatacacactttccaggcgtgctccttcagccactcggacacctcaccaaattgttttgctaccaaacctcatgggtggcaacggggcgctactatagggagttggagtaaaacggtcaagaagaattttaatgataattattgtttgctcatactgtaaacaagttgtgcagtatatctacatcgagacaagttacggacttatacttccaaagtacttcatacatatcacaaaataaaaaggccggttaaaccgaccttttactcgttctttctcttcgcccatcaggcggtaaaacaatcagcgactacggaagacaatgcggcctttgctcaggtcgtacggggtcagttcaacagtcactttgtcgcccgtcaggatgcggatgtagtttttgcgcattttaccggagatgtgtgcagtaaccacgtgaccgttttctaactctacgcggaacatggtattaggcaacgtttcaagaacggtaccttgcatttcaatattgtcttctttggccatctaatcctctggggtatcactaccgtaatttgaaccggcaagataatgccgaagttctgtaaataagtaaagatttgcgcgctaaatcgcaacaaacaggttcggcacattactccgaaaacacacggctaagccgcaccaaaagcgcaacgtataagggagcggtgagataaacgatgggcgttacctgacgcgaaaaattccttatcggcagcggggtaatgagcgtaaccaactctgcgaccgcaattataacactctggggagaaatgtgccgaaaacattcattcttgtggactaaacaagcatcgtggtacccagaaattattcggcaatcgtccgaggcgcatttgattgagataattaaggtaatcccggcggggaatttcgcaggcaccaaggcttgctgtgtgatcgttaaggacctggcagtcgataagcttaccgccatgaccgataaattcctcacagaataccagaagcgccgttttagacgcattttccatccggctgaacatggactcgccacaaaatagcgttccctgggccacgccgtacataccgccgacaagctcatcttcacgccagacttcaatggagtgggcatggccgagttcgtgaaggcgatggtaggcttcgatcacgccacgcgtgatccaggttccttcttcgcgatcgctggcacagccttcaatgacctgaccaaaagcgtaattcatcgtgacacgataggggctgcgtttatgaaatcgcttcatactacggctgatatgcagactttctggccatagcaccgcgcggggatcggggctccaccagaggatggggtcgcctggagaaaaccacggaaaaataccacgctggtaagccattaacaggcgcgcagggctaagatcgcccccaagtgccagcaggccgttaggctcacgtaatgcgccttccggggaagggaaggctatactatggcgagaaagctgaaccaggcgcatgaccgcaaaactccacgcaagtcggatcgttcaataatagcttacaaaccctgcttgaactggtaataacgcccctgtctggcaagcagttctgcgtgagtaccttgctcaataatttgcccgttgtccatcactattatttgttggaaacgagagagtccgcgaagtcgatgggtgaccattaacaccgttttctcacgcatcatttctgcaagcaattcaaggatctggctttcggttgtggcatctaagccttcggtaggttcatccagcaacaccagtggcgcatcatgtaacagcgcacgggcgatagccagacggcgcagttcaccaccggagagctggcgtccgccttcacctaaccaactgttgagacctgcatcctcgagcagcttttccaggccaacgcgacgcaagatctcgctcagagcctcatcactactgccagggctggcgagtaaaagattatcacgcagcgtggcgctaaacagatgcactcgctgaggaacaacgctgatggtctgtcgtagagccgcttcattcaggctggctatggggctatcgttaagcaaaatctcgccctgttgcgggtcccatgcgcgggtcagctgttgtaacagtgtacttttgccgcatccggttcgcccgagaatcgctatatgttccccggcgtttacctgaagagaaatccctttaagtgcctgttgagattgctccggataagtgaactgaacatcccgtaacgtcaggctaacgcgatcggcaacacgagtttgggtatcaggaaaggtgacctccggtttttgatccgttaagtcagagatacgtacggcagaggcaatgacttgccccagatgctgaaatgcacccgttactggtgccagtgcttcaaacgcggctaacgcgcagaagacaaacagggcaattaacgcgccgggttgagcattgccgccaacgccgccagacgccatccacagcatcaggatcaccgctaacgcgccaatgagcagcattatcgcttggctcaatgcggtcagttcagattgacggcgttgcgcttccagccattgaatttctgtattctctagttgcgtgcgataacgatcgctggcaccaaaaatggtcagctcagcttgcccttgcagccaggccgtcagttgttggcgatactgtccgcgaagatgagtcagattttgcccggtgctttttcccgcacgataaaacagcggtggcatcaggaaaagcgtcagtaacataatgccgcccagcgtaaaggcgagggtgaaatcaaggaaacttaacccgattgtcaccaccataatcaccacaaaagcgcccaccagcgggctgataacgcgcaggtaaagatgatcgagcgtatcaacatccgccaccacgcgattgagcaattcgccctgacgatagcgcgccagtccggcaggggagaggggcagcaatttgctgaaggtgtaaatgcgcagatgctgcaacacgcggaaagtcgcgtcgtgacttaccagacgttcaaaatagcgcccggcagtacgggtgattgctgcgccacgcacgcccgcagcgggtagcatatagttgaagctgtacagtccggcaacccccgcaaccgcactggcgctgaggaaccagccggaaagtgtcaacagaccgatactggcgagcagcgtcacaattgccagcacaataccaagacttaacatccatttatgacgtttatacagtgccagatagggtagcaaagcgcgcatttaaatctcctcctgacgatgggccagtaatgtggcgaatgggccaccagccacacttaattccgcgtaacgtccttgctcaataatccggccatcctgcataacccaaatgacatcccagtcagcaagatcttctaactggtgggtgaccattaacgttgtctggcgcagagaggcggcattcagcgcctccattacgcgctgttcactgtgagcatcaaggctggcagcgggttcatccaacagtaataggctacagggatttagtaacgcacgggccaccgccacgcgctgcgcctgccccacggaaaggcgggcagcctggtcgccaacaggcgtatcaacgccttgtgggaggagcggtagaaactcgctgacccaggcgttatccagcgctgcttgtaattcttgttcgctggcatcaggtcgcgccagtagtacgttatcccgcaatgttgctgccggtaattgtgggttttgcccaacccaggagagatgtttacgccaactttctggacttaaatcgcgtaattctatcccgttgattcgtaggcttccctgataactgagaaaaccagaaagcgcgttcagcagactgcttttaccactaccgctgcgaccaaccaacaccgcacgttggcctgctggcaaagtaaagttcagcggtccggccagcgttttaccttccgggctcgtgataaacagctcctcggcctcaatggtcaccggatcggtgcttgctaattccgcctcaccacgttgcggatgggcgagcggggtttccataaacgttttcagactgtcagctgcgccaacagcctgggctttagcatgataaaacgtaccgagatcgcgtaatggctggaaaaactctggcgcaaggatcagggccagaaaacccgcagccagcgtcacaccggtatcgtagtgaccaaaatccagctcgccgagataggaaaaaccaaagtagaccgccaccagagcaatactcaggctggtaaaaaattcgagaatgccggaggataaaaacgccagccgtagcacttccattgtccgttggcggaaatcttcgctagcagaacgaatactttcaatttcagcttcaccacgaccaaaaatacgcaatgtttccatgccgcgcaggcgatcgaggaaatgcccacttaagcgagcaagagcgagaaagttacgtcggttagcatcggcagcccccattccaaccagcgccataaacaacggaattaacggtgcagtgcccagcagaatgagcgccgcagcccagttagaggggaagattgccaccacaatcagcaacggcacgctcactgccagcgccatttgcggcagatagcgtgcatagtaatcatgcatatcgtcaatttgctcgagtaccagcgtcgcccagctccccgcaggtttaccctgaatccacgctggccctgcttgttgcagacggtcgagaacctgacggcggatggcaaagcggatatgctgcccggcgtgataacccacccgttcgcgtaaccagaccacccatgcgcgcagtacaaaggtcagaaccagtaacgtaaagggaagcagcagggcttcacggggaatattctccataatcatatgttgcagaattcgcgccatgaaccaggcctgggcaatgatcaatatgccgctcacaaagcccagcagacgagaaatattcagccaacgttgggagatgacgctttgctgttttaaccagcgggttaactctttttgacgagatttattcattgcacgcttagcaggtgagttatcagaattatttgcagagcaatgttacaacggggaaaaaataaaggcgacccatagtcgcatggtgtcgccttctttacttttgttactgatttgtaaaattattttgcgtcagctaaaccatcgaggtagcgttccgcatcaagtgctgccatgcagcctgtaccggcgctagtaatggcctggcgataaatgtgatccatcacgtcgcctgcggcaaagacgccaggaatgctggtctgggtggcattaccatgaataccgctctgtactttgatgtagccgttttccagttccagctgcccttcgaaaatcgcagtattcgggctgtgaccgatagcaacaaacagaccggcaacgtcgagactctcgatgttatcgctgttttgcgtatcgcgcagacgaacgccagtgacacccatttgatcgccggtcacttcttccagcgtacggttggtgtgcagaatgatgttgccgttctccactttatccatcaggcgcttaatgaggattttttccgcgcggaaaccgtcacggcggtgaatcagatgcacttcgctagcgatgttagacagatacagcgcctcttcaaccgcggtattgccgccgccgatgaccgcaactttctggttgcgatagaagaaaccgtcgcaggttgcacaagcagaaaccccacggcctttaaaggcttcttcagagggcaggccgagatagcgtgcagaagctccggtggcaataatcagcgcgtcgcaagtgtattcgccgttatcgccattcagacggaacggacggttttgcagatccaccttgttgatatgatcaaaaatgatctcagtttcaaacttggtggcatgttcgtgcatgcgctccattaataacggaccggtcagatcgtttggatcgccaggccagttttccacttccgtggtggtggtcagttggccgcctttttccatgccggtaatcagcacaggttgcaggttggcgcgcgccgcgtagacagcagcggtgtatcccgccgggccactacccaggataagcagtttactgtgtttggtcgtgcccatgagatccccatagttgttggcagacaatgggcaggattgtagggaatttacagacgtaaaaaaagagtatgacgattttgttaacaatttgtgcaatcggcagcatcgataagcaggtcaaattctcccgtcattatcacctctgctacttaaatttcccgctttataagccgattaaatgatgaataaacgcccctgttaatgaatatctggcatgttgtactaaaaatcgatgttttgctttgacaatcccctggtgttttgcgaaaacattcgaggaagaaaaaaaacagtattcttatatgcgcataaccatgcatgtaaataccatgtttaccgtgctagtgaaatctacgtatggcgtggacagacgccattcgtgatgtcgatagctgccacaaggcaacggtcttctcaccgtagacccaggcattgcgcgccgtgaatcttcatgatttcggtctatcgtgacgggtagcgactctgaacagtgatgtttcagggtcagacaggagtagggaaggaatacagagagacaataataatggtagatagcaagaagcgccctggcaaagatctcgaccgtatcgatcgtaacattcttaatgagttgcaaaaggatgggcgtatttctaacgtcgagctttctaaacgtgtgggactttccccaacgccgtgccttgagcgtgtgcgtcggctggaaagacaagggtttattcagggctatacggcgctgcttaacccccattatctggatgcaagtcttctggtattcgttgagattactctgaatcgtggcgcaccggatgtgtttgaacaattcaataccgctgtacaaaaacttgaagaaattcaggagtgtcatttagtatccggtgatttcgactacctgttgaaaacacgcgtgccggatatgagtgcctaccgtaagttgctgggggaaaccctgctgcgtctgcctggcgtcaatgacacacggacatacgttgttatggaagaagtcaagcagagtaatcgtctggttattaagacgcgctaacacggaacaggtgcaaaatcggcgtattttgattacactcctgttaatccatacagcaacagtactggggtaacctggtactgttgtccgttttagcatcgggcaggaaaagcctgtaacctggagagcctttcttgagccaggaatacattgaagacaaagaagtcacattgacaaagttaagtagcggccgccgccttctggaggcgttgctgatccttattgtcctgtttgccgtctggttgatggctgccttactaagctttaaccctagcgaccccagctggagccaaacggcctggcatgaacctatccataatttaggtgggatgcccggtgcgtggttggcagatacgctgttctttatttttggcgtgatggcttacaccattcccgtcattattgtcggcggttgttggtttgcctggcgtcatcagtccagcgacgaatacattgattattttgccgttagcctacgcatcattggcgttttggcgctcatccttacctcctgtggtctggcggcaatcaacgctgacgatatctggtattttgcctccggtggcgtcattggcagcttactaagcactacgctacaaccactgctacacagtagcgggggaactattgcgctgctctgcgtttgggcagcgggcctgacgttgttcaccggttggagttgggtgaccattgctgaaaaactcggcggctggattttaaacattctcaccttcgccagtaatcgtacccgtcgcgatgatacctgggtcgatgaagatgagtatgaagacgacgaagagtatgaagatgaaaatcacggcaaacagcatgaaagtcgccgtgcccgtattcttcgcggcgcgctagcgcgtcgtaaacggttggcggaaaaattcattaatccgatggggcggcaaacagacgctgcgttgttctccggtaagcggatggatgatgacgaagagattacctacactgcacgcggtgtggctgccgacccggacgacgtcctatttagcggcaatcgtgcaacgcagccagaatatgacgaatacgatccattattaaacggtgcgccaattaccgaacctgtcgctgtagcagctgctgctaccacggcgacacaaagctgggctgcgccggttgaacctgtgactcagacgccgcctgttgcctctgttgatgttccacctgcgcaacctacagtagcctggcagcctgtaccgggtccacaaacgggagagccggttattgctcctgcaccggaaggttacccacagcagagtcaatatgcgcagcctgcagtgcaatataatgagccgctgcaacaaccagtacagccgcagcagccgtattatgcacctgcagctgaacaacctgcgcaacagccgtattatgcccctgcgccagaacaaccggtggcaggtaacgcctggcaagccgaagagcagcaatccacttttgctccacagtctacataccagactgagcaaacttatcagcagccagccgctcaggagccgttgtaccaacagccgcaacccgttgaacagcagcctgttgtggagcctgaacccgttgtagaagagacaaaacccgcgcgtccgccgctttactactttgaagaagttgaagagaagcgagcccgtgaacgtgaacaacttgcggcctggtatcaaccgattccagaaccggttaaagaaccagaaccgatcaaatctagcctgaaagcaccttctgttgcagcagtacctccagtagaagccgctgccgctgtttccccgctggcatctggcgtgaaaaaagcgacactggcgacgggggctgccgcaaccgttgccgcgccagtcttcagtctggcaaatagcggtggaccgcgtcctcaggtcaaagaggggattggtccgcagttgccacgaccgaaacgtatccgcgtgccaactcgtcgtgaactggcgtcttacggtattaagctgcccagtcagcgtgcggcggaagaaaaagcccgtgaagcccagcgcaatcagtacgattctggcgatcagtacaacgatgatgaaatcgatgcgatgcagcaggatgaactggcacgtcagttcgcccagacacagcagcaacgctatggcgaacagtatcaacatgatgtgcccgtaaacgcagaagatgcagatgctgcggcagaggctgaactggctcgtcagtttgcgcaaactcaacaacaacgttattccggcgaacaaccggctggggcgaatccgttcagcctggatgattttgaatttagcccaatgaaagcgttgctggatgatggtccacacgaaccgttgtttacgccaattgttgaacctgtacagcagccgcaacaaccggttgcaccgcagcagcaatatcagcagccgcaacaaccagttccgccgcagccgcagtatcagcagccacaacagccggttgcgccgcagccacaatatcagcagccgcaacaaccggttgcgccacagcagcaatatcagcagccgcaacaaccggttgcgccgcagcagcagtatcagcagccacaacagccagttgcgccacaaccgcaggataccctgcttcatccgctgttgatgcgtaatggcgacagccgtccgttgcataaaccgacgacgccgctgccttctctggatttgctgacaccgccgccgagcgaagtggagccggtagatacctttgcgcttgaacaaatggctcgcctggtggaagcgcgtctggctgatttccgtattaaagccgatgtcgtcaattactctccggggccggttatcactcgctttgaattgaacctggcaccgggcgtaaaagcggcgcgcatttctaacttgagtcgggaccttgcccgtagtcttagcacggtggcggtgcgtgtcgttgaagttattcctggcaaaccctatgtaggtctggagttaccgaataaaaaacgacaaaccgtttatctgcgcgaagttttggataacgccaaattccgcgataatccgagcccattaaccgtggtgctgggtaaagatatcgccggtgagccggtggttgccgatctggcgaaaatgccgcacttgttggttgcggggactaccggttccggtaaatctgtcggtgtgaacgcgatgatcctgagcatgctttataaagcacagccagaagatgtgcgtttcatcatgatcgacccgaaaatgctggagcttagcgtttatgaaggcattccgcatctgttaacggaagtcgttactgatatgaaagatgccgccaacgcgctgcgctggtgtgttaacgagatggagcgtcggtataaactgatgtctgcgctgggtgtgcgtaatctggcgggttataacgaaaaaattgctgaagccgatcgcatgatgcgtccgattccagacccgtactggaagccgggtgacagtatggatgcccagcatccggtgctgaaaaaagaaccatacattgtggtgttggttgacgaatttgccgacctgatgatgacggtaggtaaaaaagtggaagagctgatagcacgtctggcgcaaaaagcccgtgccgcgggtatccacctcgtactggcaactcagcgtccaagcgttgatgttattactggtctgattaaagcgaatattccgacccgtatcgcctttaccgtatccagtaagattgacagtcgtaccattcttgatcaggctggcgcggaaagtctgctgggtatgggggatatgctctactctgggccgaactccacgttgccggtacgtgtccatggtgcttttgttcgcgatcaggaagttcatgccgtggtgcaggactggaaagcgcgtggtcgcccacagtatgttgatggcatcacctccgacagcgaaagcgaaggtggtgcgggtggtttcgatggcgctgaagaactggatccgttgttcgatcaggcggtgcagtttgtcactgaaaaacgcaaagcgagtatttctggcgtacagcgtcagttccgcattggttataaccgtgcagcgcgtattatcgaacagatggaagcgcaggggattgtcagcgaacaggggcacaacggtaatcgtgaagtgctggccccaccgccgtttgactaactaatgcatcgtatgccggataaggcgcggtagcgtcgcatccggcactctatcaactgaaaattcagtattttcttctttcctcaagctgattattagcctggaatagagagtagagggaactcccgatcgggagtgacgtaatttgaggaataatgatgaaaaaaattgccatcacctgtgcattactcagtagcttagtagcaagcagcgtttgggctgatgccgcaagcgatctgaaaagccgcctggataaagtcagcagcttccacgccagcttcacacaaaaagtgactgacggtagcggcgcggcggtgcaggaaggtcagggcgatctgtgggtgaaacgtccaaacttattcaactggcatatgacacaacctgatgaaagcattctggtttctgacggtaaaacactgtggttctataacccgttcgttgagcaagctacggcaacctggctgaaagatgccaccggtaatacgccgtttatgctgattgcccgcaaccagtccagcgactggcagcagtacaatatcaaacagaatggcgatgactttgtcctgacgccgaaagccagcaatggcaatctgaagcagttcaccattaacgtgggacgtgatggcacaatccatcagtttagcgcggtggagcaggacgatcagcgcagcagttatcaactgaaatcccagcaaaatggggctgtggatgcagcgaaatttaccttcaccccgccgcaaggcgtcacggtagatgatcaacgtaagtaaaggcacctgagtgagcaatctgagcctcgattttagcgataatacttttcaacctctggccgcgcgtatgcggccagaaaatttagcacagtatatcggccagcaacatttgctggctgcggggaagccgttgccgcgcgctatcgaagccgggcatttacattctatgatcctctgggggccgccgggtaccggcaaaacaactctcgctgaagtgattgcccgctatgcgaacgctgatgtggaacgtatttctgccgtcacctctggcgtgaaagagattcgcgaggcgatcgagcgcgcccggcaaaaccgcaatgcaggtcgccgcactattctttttgttgacgaagttcaccgtttcaacaaaagccagcaggatgcatttctgccacatattgaagacggcaccatcacttttattggcgcaaccactgaaaacccgagctttgagcttaatagcgcactgctttcccgtgcccgtgtctatctgttgaaatccctgagtacagaggatattgagcaagtactaactcaggcgatggaagacaaaacccgtggctatggtggtcaggatattgttctgccagatgaaacacgacgcgccattgctgaactggtgaatggcgacgcgcgccgggcgttaaatacgctggaaatgatggcggatatggccgaagtcgatgatagcggtaagcgggtcctgaagcctgaattactgaccgaaatcgccggtgaacgtagcgcccgctttgataacaaaggcgatcgcttttacgatctgatttccgcactgcataagagcgtacgtggtagcgcacccgatgcggcgctgtactggtatgcgcgaattattaccgctggtggcgatccgttatatgtcgcgcgtcgctgtctggcgattgcgtctgaagacgtcggtaatgccgatccacgggcgatgcaggtggcaattgcggcctgggattgctttactcgcgttggcccggcggaaggtgaacgcgccattgctcaggcgattgtttacctggcctgcgcgccaaaaagcaacgctgtctacactgcgtttaaagccgcgctggccgatgctcgcgaacgcccggattatgacgtgccggttcatttgcgtaatgcgccgacgaaattaatgaaggaaatgggctacgggcaggaatatcgttacgctcatgatgaagcaaacgcttatgctgccggtgaggtttacttcccgccggaaatagcacaaacacgctattatttcccgacaaacaggggccttgaaggcaagattggcgaaaagctcgcctggctggctgaacaggatcaaaatagccccataaaacgctaccgttaatgttatcgttgcggtaatgttgttactgtatccctgtggtcgcaggctgtggccacatctcccatttaattcgataagcacaggataagcatgctcgatcccaatctgctgcgtaatgagccagacgcagtcgctgaaaaactggcacgccggggctttaagctggatgtagataagctgggcgctcttgaagagcgtcgtaaagtattgcaggtcaaaacggaaaacctgcaagcggagcgtaactcccgaagcaaatccattggccaggcgaaagcgcgcggggaagatatcgagcctttacgtctggaagtgaacaaactgggcgaagagctggatgcagcaaaagccgagctggatgctttacaggctgaaattcgcgatatcgcgctgaccatccctaacctgcctgcagatgaagtgccggtaggtaaagacgaaaatgacaacgttgaagtcagccgctggggtaccccgcgtgagtttgactttgaagttcgtgaccacgtgacgctgggtgaaatgcactctggcctcgactttgcagctgcagttaagctgactggttcccgctttgtggtaatgaaagggcagattgctcgcatgcaccgcgcactgagccagtttatgctggatctgcataccgaacagcatggctacagtgagaactatgttccgtacctggttaaccaggacacgctgtacggtacgggtcaactgccgaaatttgctggcgatctgttccatactcgtccgctggaagaagaagcagacaccagtaactatgcgctgatcccaacggcagaagttccgctgactaacctggtgcgcggtgaaatcatcgatgaagatgatctgccaattaagatgaccgcccacaccccatgcttccgttctgaagccggtagttatggtcgtgacacccgtggtctgatccgtatgcaccagttcgacaaagttgaaatggtgcagatcgtgcgcccagaagacagtatggcggcgctggaagagatgactggtcatgcagaaaaagtcctgcagttgctgggcctgccgtaccgtaaaatcatcctttgcactggcgacatgggctttggcgcttgcaaaacttacgacctggaagtatggatcccggcacagaacacctaccgtgagatctcttcctgctccaacgtttgggatttccaggcacgtcgtatgcaggcacgttgccgcagcaagagcgacaagaaaacccgtctggttcataccctgaacggttctggtctggctgttggtcgtacgctggttgcagtaatggaaaactatcagcaggctgatggtcgtattgaagtaccagaagttctgcgtccgtatatgaacggactggaatatattggctaatacccaatttttctgaatctaaaaagcgcctgcgggcgctttttttgtctccctttgataccgaacaataattactcctcacttacacgtaatactactttcgagtgaaaatctacctatctctttgattttcaaattattcgatgtatacaagcctatatagcgaactgctatagaaataattacacaatacggtttgttactggaatcaatcgtgagcaagcttgagtgagccattatgaaaacgaaaatccctgatgcggtattggctgctgaggtgagtcgccgtggtttggtaaaaacgacagcgatcggcggcctggcaatggccagcagcgcattaacattaccttttagtcggattgcgcacgctgtcgatagcgccattccaacaaaaagtgacgaaaaggttatctggagcgcctgtacagttaactgtggtagtcgctgcccgctacgtatgcacgtcgtggacggtgaaatcaaatatgtcgaaacggacaataccggcgatgacaattacgacggcctgcaccaggttcgcgcctgcctgcgtgggcgttccatgcgtcgccgtgtctacaatccggaccgcctgaaatatccgatgaaacgagtcggggcgcgcggtgaaggcaaattcgagcgcattagctgggaagaagcctacgacatcatcgcgaccaatatgcagcgcctgatcaaagagtacggcaacgagtctatctatctgaactatggcaccggtacgctgggcggcaccatgacccgctcctggccgccgggaaataccctggtcgcgcggctgatgaactgctgcggcggctatctgaaccattacggcgactactcctccgcgcaaattgcggaaggtttgaactatacctacggcggctgggcagatggcaacagcccgagcgatatcgaaaacagtaagctggtagtgctgtttggtaataaccctggcgaaacgcgaatgagtggcggtggggtgacttactatcttgaacaggcacgccagaaatctaatgcccgcatgatcatcatcgatccgcgctataccgacaccggtgccgggcgcgaagatgagtggatccctattcgtccgggaacagatgccgcactggttaacggtctggcgtacgtcatgatcactgaaaacctggtggatcaggcattcctcgataaatattgcgttggctacgatgagaaaaccctgccagccagtgcgccgaaaaatggccactataaagcttatattctgggtgaagggccagatggcgtggctaaaacgccggaatgggccagccaaatcactggtgttccggcagacaaaatcatcaaattggctcgtgaaatcggtagtaccaaaccggcgtttatcagccagggatggggcccgcagcgtcacgctaacggtgaaatcgcaacccgtgctatcagcatgctggcgattctgaccggtaacgttggtattaacggaggcaacagcggcgcgcgtgaaggtagttacagcttaccgtttgtccgtatgccgaccttggaaaacccgatccagaccagcattagcatgtttatgtggaccgatgccattgaacgtggcccggaaatgacggcgctgcgtgatggtgtacgcgggaaagataagctggatgtgccgatcaaaatgatctggaactatgccggtaactgcctgattaaccagcattctgaaatcaaccgtacccatgaaatccttcaggatgataagaagtgcgagctgattgtggttatcgactgccacatgaccagtagcgcgaaatatgctgacatcctgctgcctgactgcaccgcttccgaacagatggactttgcgctggatgcatcctgcgggaatatgtcttacgtgattttcaacgatcaggtgattaaaccgcgctttgaatgtaagaccatctatgaaatgaccagcgaactggcaaaacgtcttggcgttgagcaacagtttactgaaggccgtacccaggaagagtggatgcggcatctgtatgcccagagccgggaagcgattcctgaactgccaacgtttgaagagttccgcaagcaggggatctttaaaaagcgcgacccacaagggcatcacgttgcttataaagccttccgtgaagatccgcaggcaaacccactgactacgccaagcggcaaaattgagatttatagccaggcgctggctgacattgccgctacctgggaattgcctgaaggcgatgtgatcgatccactgccgatctacacgccgggctttgaaagttatcaggatccgctgaacaaacagtatccgctgcagcttacaggtttccactataaatctcgcgttcacagtacttacggcaacgttgatgtgctgaaagcggcttgccgtcaggaaatgtggatcaacccgcttgatgcccaaaaacgcggtatccacaacggcgataaagtcaggatctttaacgatcgtggtgaggttcatattgaggcgaaagtgacgccacgaatgatgccgggtgtggtcgcactgggtgaaggtgcctggtatgacccggatgcaaaacgtgtcgataagggtggttgtattaacgtactgaccactcaacgtccgtctcctctcgctaaggggaatccgagtcatacaaaccttgttcaggttgaaaaggtgtaaggagtaaccgatgacaacccagtatggattttttattgattccagccgttgcaccggttgcaaaacctgcgagctggcctgtaaagactacaaagatttgacgccagaagtcagcttccgccgcatttatgaatatgctggcggcgactggcaggaagataacggtgtctggcaccagaacgtgtttgcctactatctgagcattagttgtaaccactgcgaagatccggcttgtactaaagtctgcccgagcggtgcgatgcataaacgtgaagatggttttgttgtggtcgatgaagatgtgtgcattggctgccgctactgccatatggcttgcccgtatggcgcaccgcaatataacgaaacgaaaggccatatgaccaaatgcgatggttgttatgaccgtgttgcggagggtaaaaagccgatctgtgttgaatcttgtccgctgcgggcgctggatttcggccctatcgacgagctgcgtaaaaaacatggcgatctggcggccgttgcgccgttgccgcgagctcactttaccaaaccgaatattgtgatcaaacccaatgccaatagccgcccgaccggggataccactggctatctggcaaacccgaaggaggtgtgagatgggaagtggatggcatgaatggccgctgatgatcttcacggtcttcgggcaatgtgtagcaggtggttttatcgttctggctttggcgctgctcaaaggcgacctgcgagcagaagcccagcagcgtgttatcgcctgcatgtttggtttatgggtgctgatgggcattggctttatcgcctctatgctccatcttggtagtccaatgcgcgcttttaacagcctcaaccgggtaggggctagtgcactcagtaacgaaatcgccagcggtagcatcttttttgccgtaggcggcatcggctggttgctggcaatgctgaaaaagctgagtccggcattgcgtacgctgtggctgatagtgacgatggttcttggcgtcatctttgtctggatgatggtgcgtgtgtataacagcattgataccgttccgacctggtacagcatctggacgccgatgggcttcttcctgacgatgtttatgggcggcccgttactgggttacctgttgttgagtctggctggcgtcgatggctgggcgatgcgtctgctgccagcaatttctgtactggcactggtagtgagtggcgtggtgagtgtgatgcagggcgcagagctggcgactattcatagttctgtgcagcaggccgcagcgctggtgccggactatggtgcgctgatgtcctggcggatcgtgcttttggccgttgccctgtgcttgtggattgcaccacagctaaaaggttatcagcctgcggttccgctactttctgtaagtttcattctgcttctggcaggggaattaatcggtcgcggcgtattctatggtttgcatatgaccgtggggatggccgtcgcaagctaatcataacaaccggggtttcggccccggttctcttttatttctgcttcgttaacgtgtcataactggtcatcaaattacgataatcaggaatgtggttagagaacaacgtcgccagtccttcaatatcattacgccagtcgcgatgcagctcgcacgccacgccgaaccatgtcatcaattgcgcaccagcttggctcaagcgatcccatgcgctatgccgggtaatttcattaaaggtcccactcgcgtcagtcacgacaaagacgtcaaacccttcttcaatggcactaagcgccgggaatgccacgcaaacttcggttaccacaccggcaataattaactgttttttacctgtcgctttgacagcttttacaaaatcttcgttatcccaggcgttaatatttcccgggcgagcaatgtaaggtgtatcggggaattgtgctttcagttctggaactaatgggccgttaggaccggtttcaaaactggtggtaagaatagttggtaagttgaaatacttagccaggtcacccagcgccagcacgttatttttaaacttatcgggttcgatatcccgtacaagggaaagtaaaccagcctggtgatcaacaagcaaaacggcagcatcatttttatcaagacgaacatacggtttggtcatcctcttctcctttcgagagtcagtggtacgtctgaaatcgatcagacgcgatgcattgctctgaaagcatagacgggaaatatgagtttgctgtgaccatgaaatttttcgactgaacgaagcgtatgaaatttgtgttagttcaataaaaacaatcagatgagactaatcatctcttcagcattagcgttatgaatgagtaatataaatcgataataccgccgctgggatatcgcgtattttcacccattgacaatgtttttggcggtggcatgatgcgcatgaaatttgaacttcctcacggttttaattcatgtccacgtatacccagcctgtcatgcttttgctgtctggcctgcttttgttgactctggcgattgcggtgttaaatacactcgtgccgctttggctcgcccaggaacacatgtccacatggcaggtaggcgttgtcagcagttcctattttaccggcaaccttgtcggtacattgctgacagggtatgtcattaagcgcattggctttaaccgcagctattatctggcctccttcatttttgccgctggctgtgccggccttggcctgatgattggattctggagctggttggcttggcgttttgtcgcgggcgtcggctgtgccatgatttgggtggttgttgagagcgcgctgatgtgcagtgggacgagtcgtaaccgtgggcgtttgcttgctgcgtatatgatggtttattacgtgggaacgtttttaggccagttactggtcagcaaagttagtaccgagctgatgtccgtattgccgtgggttacaggtttgacgttggcagggatcttaccgctgttgtttacgcgtgtgctgaatcagcaggctgaaaaccatgatagcacgagtattacgagtatgctaaaactccgtcaggcgcggcttggcgtgaatggctgcattatcagtggaatcgttctgggatctctatatggcctgatgccgctgtacctcaatcacaaaggggtgagcaatgccagcattggtttctggatggcggtactggtcagtgcgggtatccttggacaatggccgattggacgtctggcggataagtttggtcgactgctggtgttgcgtgttcaggtctttgtcgtcattctcggcagtatcgcgatgcttagccaggcggcgatggccccagcgttattcatcctcggtgccgctggctttacgctatatccggtggcgatggcatgggcttgcgagaaagttgaacatcatcaactggtggcgatgaaccaggccttactgttgagctatactgtgggaagtctgcttggcccgagttttaccgctatgctaatgcagaatttctccgataatttattgtttatcatgatcgccagcgtaagctttatctatttgctgatgctgctgcgcaacgccggtcatacgccgaaacccgttgctcacgtgtaaatgaattcaagcagagtgtgaacttactgtttcacactctgcttttttgtttcttctatctgacttgctttattccaaattttattcgtttaaaaataaaatgtgcagcaggttataattttgcatttcgctatttccgcacttcttatttgccgcgcataatccctcgttttaccgatgcccctttaattttggcgaaggatttgtctatggctgggaatgttcaggaaaaacagttgcgatggtacaacattgcgctgatgtcttttatcactgtctggggttttggcaacgttgttaataactatgccaaccaggggctggtggttgtttttagttgggtgtttatctttgcactctatttcacaccttatgcgctaattgttggtcagttaggcagcaccttcaaagatgggaagggcggggtcagtacctggattaaacacacgatgggacccggactggcttatctcgccgcgtggacctactgggtggtgcatattccctatctggcacaaaaaccccaggcaattctgattgcgctcggttgggcgatgaaaggcgacggtagcctaatcaaagaatatagtgtcgtagcgttacaggggttaacgctggtgctgtttatcttctttatgtgggttgctagtcgcggtatgaaaagcctgaaaatcgtcggttctgtggcagggattgctatgtttgttatgagtctcctgtatgtggcgatggcggtaaccgcgcctgcaattactgaagtgcatattgcgaccacaaacattacctgggaaacgttcattcctcatatcgactttacctacattaccactattagtatgctggttttcgcggttggcggagcagagaagatttctccttacgttaatcaaacgcgcaacccaggaaaagaatttccaaaagggatgttatgcctggcggtgatggttgcggtttgtgccattctgggcagcctggcgatggggatgatgtttgatagccgtaatatcccggatgacttaatgaccaacggtcagtattacgcctttcagaagctgggcgagtattacaacatgggtaatactttaatggtgatttacgccattgcgaataccctgggacaagtagcggcgctggtattcagcattgatgccccgcttaaagtgctattaggtgatgctgacagcaaatatattccagccagtttatgtcgtaccaacgcttctggtacgcccgttaatggctattttctgaccctggtactggtggcgattctgattatgctgccgactctcggcattggtgatatgaacaatctctataaatggctgttgaaccttaatagcgtagtgatgccgctgcgttatttatgggtatttgttgcatttattgcagtcgttcgcttggcgcagaaatataaaccagaatatgtctttattcgtaataagcctctggcaatgaccgtcgggatttggtgttttgcctttaccgcctttgcctgtttgacggggatcttcccgaaaatggaagccttcactgcagagtggaccttccagttggcgctgaatgttgcaacgccgtttgtgctggtaggattaggactgatattcccgctgctggcgcgtaaagcgaatagtaaataattattgtggtcggtgacgctgactctggcagatctgacccgtttttacataatcgagaaatgcgcgcaagccgcaggacatatactggcggtttggataatagatctggaagcctggacgctctgtgctccagtcttccagtacacattctaaacgaccagtatcaaggtactccttgatctgttcatagagcagatacccgataccagcacccatcaaaacggcctccagttcagcatcaacatcatccagaatgatatttcctgcgacagcaatttccagctcctttgcaaattgccagtggaaaggtttgccgctgggataacgaaaaacaacacattgatgattaagcagatcatgaggatggcggggtttgccatatcttgcaaagtactctggcgttgctgctacacataatttcactggcgggccgatcgccacgctgatcatatctttttcgacgatgcaactaagtcgaacgccagcgtcaaagccctgttggacgatatcgacaagagagtcgtcagttgtgagctcgactttaatatcaggatattcacgtgtgaaaccaaccagtaaagacattaaaaatatacgtgcagctacccgggcggcattgattttgagcgttcctgtcggtgtcagacgaaaatcattcatctcatctaacatgatctgaatttcgtcgaaagctgggcgcaatcgttcatagagattagaacccgcttccgttaagcttacgcttcgggttgtccgattgaataagcgaattttaagacgttgttccagtgttttaatactatggctaatggcggagctggataagcctaactcatcgcccgctgcacgaaagctttgattacgggccacggcaaagaaagtggcaaagtcagacatattcatccgcattagtgaaaatccttcattaactcatcctgaatcatcacgtttacaggattatgccgcctgcgtaaagtgcgctccagaacttaacgtggaggtaaaattatgcagtctgaacgtatttatttggtatgggcccatcctcgtcatgatagtttgaccgcacatattgctgatgcgatccatcagcgggcaatggagcggaaaatacaggtgacggaactcgatttatatcggcgtaatttcaacccagtgatgacgccggaagatgaaccagactggaagaatatggataaacgttattctccagaggttcatcagctttatagtgagctgcttgaacatgacacgttagtggtggtttttcctctctggtggtacagcttcccggcaatgctaaaaggatatattgacagagtatggaataatgggctggcttatggagatgggcacaaattaccattcaataaagttcgttgggtggcgctggttggaggagacaaagaaagttttgtccagatgggctgggaaaaaaatataagcgattatttaaaaaatatgtgcagttatcttggtattgaagatgccgatgtcactttcttgtgtaatacagtggtattcgatggggaagaacttcacgcgagctattatcagagcttattatctcaggtacgggatatggtagatgcactataagatgtgttaaaaacgctgtagcagaatgaagcgcggaataaaaaagcggcaactcaataaagttgccgctttacggggaaattagaacattaccttatgaccgtactgctcaagaatgcctttcacgcgttccatggtctctttcttcggtggtttaacaccgtcgagtttgtactcttcacccattgccacccatttgtgtttgcccagctcgtggtaggggagaagctcgattttctcaacgttgcccatatcacgggtaaattcaccgaggcgatgcgcactatcgtcatcgtcagaccagcctgggacaacaacgtagcggatccacaccttcacatttttgttcgccagatatttagcgaactccagcgtgcggtggttggaaactccaaccagattttggtggatctcgtcgttcatctgtttgagatcgagcattaccaggtcggttacttccagcagttcatcaatcaccggatcgtaacgacgaacaaaaccgttggtgtccagacaggtatgaatgccttcttttttgcaggcgcggaaccagtcacgaacaaactcagcttgcaggattgcttcaccgccggatgcggtaacgccgccgccggaagcgttcataaagtggcgataggtcaccacttccttcatcaaatcttcaacggtaacttctttaccgccatgcgtgtcccaggtgtcgcggttatgacaatacaggcagcgcatcaggcagccctggaaaaaggtgataaagcgaatacctgggccgtctacggttccacaggattcaaaggagtgaatgcgaccaataacactcattgcggtgtttctccagatgtggcccatctgaggccgtgttggtgcgcagctcgaaggctacgtcgagtctgttttggcagtcaccttaaagtatagatagctgacaaaaaaggctctcgcgctaaaaaaggccccactttcgtggagcctttattgtacgctttttactgtacgatttcagtcaaatctaattacatagattgagtgaaggtacgagtaataacgtcctgctgctgttctttagtcaggctgttgaaacgtactgcgtagccagatacacggatggtcagctgcggatatttttccgggttttccatcgcgtcgagcagcatttcacggttcatcacgttaacgttcaggtgctgaccaccttcgatggatgcttcgtggtggaagtaaccatccatcagaccagccaggttggtcttacgaacttcgtcgtctttacccagtgcgttcggaacgatagagaaggtgtaggagataccatctttagcgtaagcaaacggcagtttagcaacggaagtcagagaggctactgcacctttctggtcacgaccgtgcatcgggttagcacccggtccgaacggcgcgccagcacgacgaccgtctggggtgttacccgttttcttaccatacacaacgttagaagtgatggtcagaacagactgagtcgggatagcgtcacggtaggtgtgcagtttctgaattttcttcatgaaacgttctaccaggtcaacagccaggtcatctacacgcggatcattgttaccaaactgcgggtattcgccttcgatttcgaagtcgatagccagaccgtcttcgtcacgaatcggtttaactttcgcatatttgattgcagacagggagtcagcagcaacggacagaccagcgataccacacgccatggtgcggataacgtcacggtcgtgcagcgccatcagagaggcttcgtagctgtacttgtcgtgcatgtagtggatgatgttcagtgcagtgatgtactgtttagccagccagtccatgaagtgatccatgcgctccatcacttcatcatagttcaggacatcgcctttgatcggttcagacttcggaccaacctgcattttcagtttttcgtcaacgccgccgttgattgcgtacagcatggttttcgccaggtttgcacgcgcaccgaagaactgcatttgtttaccaacgatcatcgggcttacgcagcaagcaatagcgtagtcatcgttgttgaagtccggacgcatcaggtcatcgttctcatactgcagagaagaggtgtcgatggacactttagcggcgaatttcttgaagttcagcggcagtttttcagaccacagaatggtcatgttcggttccggagacggacccatggtgtacagggtgttcaggaaacggaagctgtttttggtaaccagggtacgaccgtcgaggcccataccaccgatagattcggttgcccagatcgggtcgccagagaacagttcatcgtattccggagtacgcaggaagcgaaccatacgcagtttcatgaccaggtggtcaaccatttcctgcgcttcttgttcggtgatcttgccagctttcaggtcacgttcgatgtacacatccaggaaggtggaggtacgaccgaaggacattgcagcaccgttctgagacttaacagcagccaggtagccgaagtaagtccactggatagcttcctgagcgttggtagccggaccagagatgtcgtagccgtatttcgcagccatttctttcatctgacccagagcgcggtgctgttcagcgatttcttcgcgcagacggatagtctgttccaggtttacgccgttttccagatcagcctgcagagaagtgaactgtgccagtttgtctttcatcaggtagtcgataccgtacagcgcaacgcgacggtagtcaccgatgatacggccacggccatatgcatctggcagaccggtcagaacaccagatttacggcaacgcaggatgtccggagtgtaaacgtcgaacacgccctggttgtgagttttacggtattcagtgaagatttttttgatcatcggatccagttcgcggttgtacgctttgcaggaaccttcgatcattttgataccaccgaacgggataagagcacgtttcagcggagcttcagtctgcagaccaacgattttctcaagctgcttgttgatgtagccagcgtcgtgagaggtgatggtggaagcaacagcggtgtcaaagtcaactggcgcgtgagtgcggttttccagtttaacgccttccattactttgtcccacagggtggtggtcgcttcagtagcgccagccaggaaggactcgtcaccctcgtacggagtgtagtttttctgaatgaagtcacggacgtttacttcattctgccagtcacctttggtaaaaccttcccaggctgtggctaacttttcattaagctcggacatgtaacacctaccttcttaagtggattttttatttactgcgtacttcgacaaccattaatggtggtcgttttcacgcaggtaaatgacccagtatgtcaacccaaccaacaaaccaccaccgataatgttgccgatcgtaaccggaatcaggttatcagtgatgaaattcatcacggtcaggtgagaaaaattttccggtgcagaaccgactgcggtccaaaattccggggatgcgaagtcgcggattacaatacccatcgggatcataaacatgtttgcgatactgtgctcaaaaccgctggcaacaaacatcgcgaccggcagcaccataatgaacgctttgtccatcaggctgcggccagaataactcatccatactgccagacataccatcaggtttgccaggataccaagacagacggcctcaataaaagtatggtgcactttgtggtcggcggtttgtaggacgtttagtccccattgaccatttgcggtcatatactcgccggaaagccacattaaaagtacaaacagcagtgcgccgaccaggttgccaaaatagacatttagccagtttttcgccaactgaccccaggtgatgcgcccactcgccttagcaacaacaatcaacacggtggaagtaaagagatcggctccgcagacaacacaaagaatcagccccagagagaagcaaatgccgccaaccagttttgccatgccgaagggcattgtgcctgtgccagtggttgctgtgatatagaagacgaatgcgatactgatgaaaacaccggcggtaatcgccagatagaaagtcttaagcggatgtttcgttgctttatagacacccgcctcttcggccactttggccattgcagcaggaagtaaaagatcaaaagggttgtcagctttcacactaactctctctttattaagtcggcgacgagatactaacaaagcattatagatgagaaattgatatagatcatatctcgcctggcttataggcccgtaactcgcatggtttttatgcaaatacggagtaaatatttgattatccaaataaaaataaattttaaaaattaacaaatgagttgaattttttccgcatcctccgctaaaacagttaattaaaagggagcatcaggcgaataaagtaacaatatcgatcgtatttattaaatacaaattaccgatatttaaccttataattacaattattttattaatgcaaatatatgtaaagcggggcattaaaaaaacgccccgtaatataactcagactaatcattaagcctacattgcgtaggctatttgattttattttgcccagaatgctgctttggcgcgctgcagcttttcgtaggccttcaacaagctctgatgtgcagcaaacgcgtgcagatcgctatctaccggttgcaggccgtaaaacgccgcttcgccgctcattgccgcactggcggcttctacggcatctgcgccgtacatgcgaacaaacgcattcagatattgcagcggctggcgatcttcttcctgtgccagtaataacaacgtttgcaggcagcgataatagttggcgcgttccggactaaatacactactgttaaactccatcgtccattcggtccagaccagagcctgttccagatcgccaccagccagcgccagcatggcttttaattcaccgatacgcagggtgtaccaaccgttatcgctcccggtcgccagacccaacagctcacgcacgcgggtaaagtcatcaaaaccttcttcatccagttgctcgatgaggttcaggtaatcttctttttcccactcgctgcctggtaggctaagaatcgtttcacgtaaatggctgcccatactgttattcgcgagccacagatcttcagccggataaatatcggacatgccaggcacgataatacggcaagcataaacgcccagatgctcgtaatcggcaatataaacttctttatcttctttgttgaagatagccatcagtgtggcgaactcttcttccgtggtgccggagaaattccagtccacaaacggataatcggcatcctgcttgaacaggtcccaggagattaaaccgctggaatcgataaagtgcgtttcgaggttggtatgttcagcgacttcttcatcatcgaaggttggcggagtaaacacatccaaatctttcaggccacgaccttgcagcagctcggtcacggtacgttccagtgctacgccaaaatcaggatgcgcaccgaaagaggcaaagcaggtaccgttagcaggattgaacagtaccacgcaaatcaccggatactggccgccaaggctaccgtcataagcgaagattgggaaaccctccgcttccagcgtttcgatggcttcaactactgctgggtaacgcgccagcacgtctgccgggatctctggcaggctgatgctttcagcaataatgcggtttttcacgtagcgttcgaaaacttcagacaatccctgaacgcgtgcttcgttgcgggtattacctgcggacataccgttggagacgtacaggttaccaatgatattcatcggaatataaacggtctgattgtcggactgacgcgtaaacggcaggccgcaaataccacgatcttcgttaccggattgtaggtcaatcagcatgctgccggtcagttcattctccggatcataaaacgcgcgcagacggtcatcgagcagcccttctggcacatcgtcattttcggtcagtgggaaccatttttcgttgggataatgcacgaacggaccgttggcgatggtttcgcccagccagaagtccgcaaaaaagtagttggtactgagacgctcgaaatattcaccgagtgcagaagccagcgccgctttcttggttgcgcctttaccgttggtaaaacacagtgcgcactctttgtcgcgaatatgtacagaccagacgttaggcacgggattcagccaggaggcctcttcaatctgaaagccgaggtcactaagtttttgctggaagcgagcgatggaatcttccagagcggcatctttgccggggataaatgtttgcgtcatgaaaatcactttagtcgtacggaaagcgcgcaataatacgggttttatctcaaaggcgctatcaccgccgccatgccgatgaactgttgactatgcttttagcggataaaccacgttaagagcataaaaatgaaggcgttcgatctccaccgtatggcatttgataaagtgccttttgatttccttggcgaagttgcactacgtagtctttatacctttgtactggtctttttgttcctcaaaatgaccggaagacgcggtgtgcggcagatgagcctgtttgaagttttaatcattctgacgctgggaagtgcggcgggagatgtggcgttttatgatgatgtgccgatggtcccggtacttatcgtctttattactctggcgttgttataccgcctggtaatgtggttgatggcgcacagtgaaaaactggaagatcttctggaaggcaagccagttgtcattattgaagatggcgagctggcctggagcaaactcaataactccaacatgacggaatttgagttctttatggagctacgattgcgtggcgtggagcagctggggcaggtacgtctggcgattctcgaaaccaacgggcaaatcagtgtctatttctttgaagatgacaaggtgaaaccgggtttacttattttacccagtgattgtacgcagcgttacaaagtggtgccggagagcgcggactatgcctgtattcgttgtagtgaaatcattcatatgaaagcgggggaaaaacaattatgtccgcgctgtgcaaatccagaatggacgaaggcaagtcgggcaaaacgggtgacctgacagtaaaaacatcggctttttgctaataatccgagagattcttttgtgtgatgcaagccacatttttgccctcaacggttttactcattgcgatgtgtgtcactgaatgataaaaccgatagccacaggaataatgtattacctgtggtcgcaatcgattgaccgcgggttaatagcaacgcaacgtggtgaggggaaatggctcaaatcttcaattttagttctggtccggcaatgctaccggcagaggtgcttaaacaggctcaacaggaactgcgcgactggaacggtcttggtacgagcgtgatggaagtgagtcaccgtggcaaagagttcattcaggttgcagaggaagccgagaaggattttcgcgatcttcttaatgtcccctccaactacaaggtattattctgccatggcggtggtcgcggtcagtttgctgcggtaccgctgaatattctcggtgataaaaccaccgcagattatgttgatgccggttactgggcggcaagtgccattaaagaagcgaaaaaatactgcacgcctaatgtctttgacgccaaagtgactgttgatggtctgcgcgcggttaagccaatgcgtgaatggcaactctctgataatgctgcttatatgcattattgcccgaatgaaaccatcgatggtatcgccatcgacgaaacgccagacttcggcgcagatgtggtggtcgccgctgacttctctagtaccattctttcccgtccgattgacgtcagccgttatggtgtaatttacgctggcgcgcagaaaaatatcggcccggctggcctgacaatcgtcatcgttcgtgaagatttgctgggcaaagcgaatatcgcgtgtccgagcattctggattattccatcctcaacgataacggctccatgtttaacacgccgccgacatttgcctggtatctatctggtctggtctttaaatggctgaaagcgaacggcggtgtagctgaaatggataaaatcaatcagcaaaaagcagaactgctatatggggtgattgataacagcgatttctaccgcaatgacgtggcgaaagctaaccgtagccggatgaacgtgccgttccagttggcggacagtgcgcttgacaaattgttccttgaagagtcttttgctgctggccttcatgcactgaaaggtcaccgtgtggtcggcggaatgcgcgcttctatttataacgccatgccgctggaaggcgttaaagcgctgacagacttcatggttgagttcgaacgccgtcacggttaatgccgaaattttgcttaatccccacagccagcctgtggggtttttatttctgttgtagagagttgagttcatggaatccctgacgttacaacccatcgctcgtgtcgatggcactattaatctgcccggttccaagagcgtttctaaccgcgctttattgctggcggcattagcacacggcaaaacagtattaaccaatctgctggatagcgatgacgtgcgccatatgctgaatgcattaacagcgttaggggtaagctatacgcttagtgccgatcgtacgcgttgcgaaattatcggtaacggcggtccattacacgcagaaggtgccctggagttgttcctcggtaacgccggaacggcaatgcgtccgctggcggcagctctttgtctgggtagcaatgatattgtgctgaccggtgagccgcgtatgaaagaacgcccgattggtcatctggtggatgcgctgcgcctgggcggggcgaagatcacttacctggaacaagaaaattatccgccgttgcgtttacagggcggctttactggcggcaacgttgacgttgatggctccgtttccagccaattcctcaccgcactgttaatgactgcgcctcttgcgccggaagatacggtgattcgtattaaaggcgatctggtttctaaaccttatatcgacatcacactcaatctgatgaagacgtttggtgttgaaattgaaaatcagcactatcaacaatttgtcgtaaaaggcgggcagtcttatcagtctccgggtacttatttggtcgaaggcgatgcatctagcgcttcttactttctggcagcagcagcaatcaaaggcggcactgtaaaagtgaccggtattggacgtaacagtatgcagggtgatattcgctttgctgatgtgctggaaaaaatgggcgcgaccatttgctggggcgatgattatatttcctgcacgcgtggtgaactgaacgctattgatatggatatgaaccatattcctgatgcggcgatgaccattgccacggcggcgttatttgcaaaaggcaccaccacgctgcgcaatatctataactggcgtgttaaagagaccgatcgcctgtttgcgatggcaacagaactgcgtaaagtcggcgcggaagtggaagaggggcacgattacattcgtatcactcctccggaaaaactgaactttgccgagatcgcgacatacaatgatcaccggatggcgatgtgtttcagcctggtggcgttgagtgatacaccagtgacgattcttgatcccaaatgcacggccaaaacatttccggattatttcgagcagctggcgcggattagccaggcagcctgaatgaacaacgggcaataaatagccaaatctttctttatcaaaacgtcggcacattgtcggcgttttttttcggaccttgtgagtcattttgattaatggtagcgtcgcttgtcaatgtaagttgttgatacataatatttatatatgattaatcaacggatgattcacatgaagaatactaaattactgctggcgattgcgacctctgcagcattactgacagggtgtcaaaatacccacggtattgataccaatatggctatcagctccggtttaaatgcctataaagcagcaacattaagcgatgccgatgcaaaagcgattgccaatcagggctgtgccgaaatggacagcggcaatcaagtcgcaagtaaatccagcaagtacggtaaacgtctggcaaaaatcgccaaagcattgggtaacaatattaatggcacgccggtcaactataaggtttatatgaccagcgacgtcaacgcatgggcgatggcgaacggctgtgttcgtgtctacagtggcctgatggacatgatgaatgacaacgaaattgaaggcgttctgggccatgaactgggccacgtcgcgttgggtcacagcctggctgaaatgaaagcttcttatgcgatcgttgccgcacgcgatgccattagtgctaccagcggtgtggcttcccagctttcccgcagtcaattaggtgatatcgcagaaggcgctatcaatgctaaatactcccgtgataaagagtccgaagcagatgatttctcctttgatctgttgaagaaacgtggcatcagcacccaggggctggttggcagctttgaaacactggctagcctggatggcggtcgcacccagtccatgtttgactctcacccaccaagtacagagcgtgcgcaacacatccgtgatcgtatcgcctctggtaagtaaatcattgtcatctttcgggctggtcttctgccagcccgctataattgcgcaataaatccccatctgaatacagacaaaactggtttttgcacacaacgttaacgatttgtggcgtcggcgcgtataatgcgcgcggttatgttaacggtacgcctgttttaaggagataaagatgacggcaattgccccggttattaccattgatggcccaagcggtgcagggaaaggcaccttgtgtaaggctatggcggaagcgttgcaatggcatctgctggacagcggtgcaatttatcgcgtactggcattggcggcattacatcaccatgttgatgttgcgagcgaagatgcgctggtaccgctggcatcccatctggatgtacgttttgtgagcaccaatggcaatctggaagtgatcctcgaaggggaagatgtcagcggcgaaattcgtactcaggaagtggcgaatgcagctagtcaagtcgcggcattcccacgcgttcgtgaagcattattgcgtcgccaacgcgcgtttcgcgaattaccaggtctgattgccgatggccgcgacatgggaacggtggtattccctgatgcaccagtgaaaattttccttgacgcctccagcgaagaacgtgcgcatcgccgcatgctacagttgcaggagaagggctttagtgttaactttgagcgccttttggccgagatcaaagaacgcgacgaccgcgatcgtaaccgagcggtagcgccactggttccggcagccgatgctttagtgttggattccaccaccttaagcattgagcaagtgattgaaaaagcgctacaatacgcgcgccagaaattggctctcgcataagcgaccgaatttgcagtacccccgttgcaatggaatgacagcgggtatgttaaacaaccccatccggcatggagccaggtggacgttaaatataaacctgaagattaaacatgactgaatcttttgctcaactctttgaagagtccttaaaagaaatcgaaacccgcccgggttctatcgttcgtggcgttgttgttgctatcgacaaagacgtagtactggttgacgctggtctgaaatctgagtccgccatcccggctgagcagttcaaaaacgcccagggcgagctggaaatccaggtaggtgacgaagttgacgttgctctggacgcagtagaagacggcttcggtgaaactctgctgtcccgtgagaaagctaaacgtcacgaagcctggatcacgctggaaaaagcttacgaagatgctgaaactgttaccggtgttatcaacggcaaagttaagggcggcttcactgttgagctgaacggtattcgtgcgttcctgccaggttctctggtagacgttcgtccggtgcgtgacactctgcacctggaaggcaaagagcttgaatttaaagtaatcaagctggatcagaagcgcaacaacgttgttgtttctcgtcgtgccgttatcgaatccgaaaacagcgcagagcgcgatcagctgctggaaaacctgcaggaaggcatggaagttaaaggtatcgttaagaacctcactgactacggtgcattcgttgatctgggcggcgttgacggcctgctgcacatcactgacatggcctggaaacgcgttaagcatccgagcgaaatcgtcaacgtgggcgacgaaatcactgttaaagtgctgaagttcgaccgcgaacgtacccgtgtatccctgggcctgaaacagctgggcgaagatccgtgggtagctatcgctaaacgttatccggaaggtaccaaactgactggtcgcgtgaccaacctgaccgactacggctgcttcgttgaaatcgaagaaggcgttgaaggcctggtacacgtttccgaaatggactggaccaacaaaaacatccacccgtccaaagttgttaacgttggcgatgtagtggaagttatggttctggatatcgacgaagaacgtcgtcgtatctccctgggtctgaaacagtgcaaagctaacccgtggcagcagttcgcggaaacccacaacaagggcgaccgtgttgaaggtaaaatcaagtctatcactgacttcggtatcttcatcggcttggacggcggcatcgacggcctggttcacctgtctgacatctcctggaacgttgcaggcgaagaagcagttcgtgaatacaaaaaaggcgacgaaatcgctgcagttgttctgcaggttgacgcagaacgtgaacgtatctccctgggcgttaaacagctcgcagaagatccgttcaacaactgggttgctctgaacaagaaaggcgctatcgtaaccggtaaagtaactgcagttgacgctaaaggcgcaaccgtagaactggctgacggcgttgaaggttacctgcgtgcttctgaagcatcccgtgaccgcgttgaagacgctaccctggttctgagcgttggcgacgaagttgaagctaaattcaccggcgttgatcgtaaaaaccgcgcaatcagcctgtctgttcgtgcgaaagacgaagctgacgagaaagatgcaatcgcaactgttaacaaacaggaagatgcaaacttctccaacaacgcaatggctgaagctttcaaagcagctaaaggcgagtaattctctgactcttcgggatttttattccgaagtttgttgagtttacttgacagattgcaggtttcgtcctgtaatcaagcactaagggcggctacggccgcccttaatcaatgcagcaacagcagccgcttaatttgcctttaaggaaccggaggaatcatgaccaagagtgaattgatagaaagacttgccacccagcaaagccacattcccgccaagacggttgaagatgcagtaaaagagatgctggagcatatggccagcactcttgcgcagggcgagcgtattgaaatccgcggtttcggcagtttctctttgcactaccgcgcaccacgtaccggacgtaatccgaagactggcgataaagtagaactggaaggaaaatacgttcctcactttaaacttggtaaagaactgcgcgatcgcgccaatatttacggttaagttttttactcaaacttgaacgagagaaaagcacctgtcgggtgcttttttcatttctctaatctggaactggaagctgcctcgcagagttttgaacagttttcaccctttcgttaaattcttctgaatatgcctcggggaacgcaaaattcccaccagacaaccgctcaacaaagttgcacactttccataaacagggaggggtgcatgaaaataacgacagtcggtgtatgcataattagcggaatttttccgttgctgattttgccccaattgcctgggacattaacccttgcgtttctgactctcttcgcctgcgtactggcatttatccctgttaaaaccgtccgttatatcgcgctgacgttgctgtttttcgtttggggcatattaagtgcaaagcaaattttgtgggcaggagaaaccttaactggcgcgacgcaggatgcaattgttgagatcactgcaactgacggcatgaccactcattacggtcaaattactcatctacaaggtcgacgtatattccctgcgagtggtctcgtgatgtatggcgaatatcttccgcaagcggtttgtgctggacaacaatggagtatgaaactcaaagttcgtgcagttcatggccaacttaatgatggcggctttgatagccagcgttatgccattgcccagcatcagccgctcaccggccgttttctgcaggcaagtgtcattgaaccgaattgtagcctgcgtgcacagtatctggcgagtctacaaacaacgctgcaaccctatccgtggaatgcggttattcttggtttaggtatgggggaacggttatccgtccccaaagaaatcaaaaatatcatgcgcgatactggaacggcgcatttaatggcgataagcggattgcacatcgcttttgcggcgttgctggctgccggactcattcgcagtggacaaatttttctgcctgggcgctggatccactggcaaataccattaattggcggaatctgctgtgctgctttttatgcctggttgacgggaatgcaacctcctgcattgcgtaccatggtggcgcttgctacgtggggaatgcttaagttaagtgggcgacagtggagtggctgggatgtatggatatgttgtctggcggcaattttgctgatggatcctgttgccattctcagccaaagtttatggctctctgccgctgcggtcgcggcattgatattttggtatcagtggcttccctgtcctgagtggcaactgccgccggtattgcgtgcagttgtttccctcatccatctgcaactgggaatcacacttctgcttatgcccgtgcaaatcgtcatatttcatggcattagtctgaccagctttattgcaaatctattagcaattcccttggtgacatttatcacggttccgttgatcctcgccgcgatggttgtgcatttaagcgggccgttaatcctggagcaagggttatggtttcttgccgaccggtctttggctttacttttctgggggttaaagagtttgccggaagggtggatcaacattgctgaatgttggcaatggctaagtttttccccatggttcttactggtggtatggcgattaaacgcctggcgaacgttgccagcaatgtgtgtggctggaggcttgctgatgtgctggccgctgtggcaaaaacctcgacctgacgagtggcagctgtacatgcttgatgtcgggcaagggctggcaatggtgatagccagaaacggcaaagcgattctctatgacacaggactggcctggcctgaaggggatagtgggcaacaactgattatcccctggctccactggcataatcttgaaccggaaggcgttattctgagccatgaacatctggatcaccggggagggctggatagtatattgcatatatggccgatgttatggatcagaagtccgttaaactgggaacatcatcagccctgtgtgcgtggcgaagcgtggcaatggcaaggattgcgtttcagcgcgcactggcctttacaaggtagcaacgataaaggaaataaccattcctgtgtggttaaggttgatgacgggacgaatagcattcttctaaccggtgatattgaagccccagctgaacaaaagatgctaagccgttactggcagcaagtgcaggcaacattgcttcaggtacctcaccatggcagtaataccagtagtagcttgccattaattcagcgagtgaatggaaaagtggcactcgcaagcgcaagccgctataacgcatggcgactgccctctaacaaagttaagcatcgctatcaactgcaaggatatcaatggattgatactccacatcaaggtcaaacaacggtcaattttagtgcgcaaggctggcggattagcagcctcagggagcaaattttacctcgttggtatcatcagtggtttggcgtgccagtggataacgggtaaaatatgcggctatttcaacaaatgctggttttttgaatgcataacgacaaagatctctctacgtggcagacattccgccgactgtggccaaccattgcgcctttcaaagcgggtctgatcgtggcgggcgtagcgttaatcctcaacgcagccagcgataccttcatgttaagcctccttaagccacttcttgatgatggctttggtaaaacagatcgctccgtgctggtgtggatgccgctggtggtgatcgggctgatgattttacgtggtatcaccagctatgtctccagctactgtatctcctgggtaagtggaaaggtggtaatgaccatgcgtcgccgcctgtttggtcacatgatgggaatgccagttagtttctttgacaaacagagtacgggtacgctgttgagtcgtattacctacgattccgaacaggttgcttcttcttcttccggcgcactgattactgttgtgcgtgaaggtgcgagcatcatcggcctgttcatcatgatgttctattacagttggcaactgagcatcattttgattgtgctggcaccgattgttagcattgcgattcgcgttgtaagcaagcgttttcgcaacatcagtaaaaacatgcagaacaccatggggcaggtgaccaccagcgcagaacaaatgctgaagggccacaaagaagtattgattttcggtggtcaggaagtggaaacgaaacgctttgataaagtcagcaaccgaatgcgtcttcaggggatgaaaatggttagtgcctcttccatctctgatccgatcattcagctgatcgcctctttggcgctggcgtttgttctgtatgcggcgagcttcccaagtgtcatggatagcctgactgccggtacgattaccgttgttttctctagtatgattgcactgatgcgtccgctgaaaagcctgaccaacgttaacgcccagttccagcgcggtatggcggcttgtcagacgctgtttaccattctggacagtgagcaggagaaagatgaaggtaagcgcgtgatcgagcgtgcgactggcgacgtggaattccgcaatgtcacctttacttatccgggacgtgacgtacctgcattgcgtaacatcaacctgaaaattccggcagggaagacggttgctctggttggacgctctggtagcggtaaaagtaccatcgccagcctgatcacgcgtttttacgatattgatgaaggcgaaatcctgatggatggtcacgatctgcgcgagtataccctggcgagcttacgtaaccaggttgctctggtgagccagaatgtccatctgtttaacgatacggttgctaacaacattgcttacgcacggactgaacagtacagccgtgagcaaattgaagaagcggcgcgtatggcctacgccatggacttcatcaataagatggataacggtctcgatacagtgattggtgaaaacggcgtgctgctctctggcggtcagcgtcagcgtattgctatcgctcgagccttgttgcgtgatagcccgattctgattctggacgaagctaccagcgctctggataccgaatccgaacgtgcgattcaggcggcactggatgagttgcagaaaaaccgtacctctctggtgattgcccaccgcttgtctaccattgaaaaggcagacgaaatcgtggtcgtcgaggatggtgtcattgtggaacgcggtacgcataacgatttgcttgagcaccgcggcgtttacgcgcaacttcacaaaatgcagtttggccaatgatcgaaaaaatctggtctggtgaatcccctttgtggcggctattgctgccactctcctggttgtatggcctggtgagtggcgcgatccgtctttgctataaactaaaactgaagcgcgcctggcgtgcccccgtaccggttgtcgtggttggtaatctcaccgcaggcggcaacggaaaaaccccggtcgttgtctggctggtggaacagttgcaacagcgcggtattcgcgtgggggtcgtaagccggggatatggtggtaaggctgaatcttatccgctgttattgagcgcagataccacaacagcacaggcgggtgatgaacctgtgttgatttatcaacgcactgatgcgcctgttgcggtttctcccgttcgttctgatgcggtaaaagccattctggcgcaacaccctgatgtgcagatcatcgtaaccgacgacggtttacagcattaccgtctggcgcgtgatgtggaaattgtcgttattgatggtgtgcgtcgctttggcaatggctggtggttgccggcggggccaatgcgtgagcgagcggggcgcttaaagagcgttgatgcggtaatcgtcaacggcggtgtccctcgcagcggtgaaatccccatgcatctgctgccgggtcaggcggtgaatttacgtaccggtacgcgttgtgacgttgctcagcttgaacatgtagtggcgatggcggggattgggcatccgccgcgcttttttgccacgctgaagatgtgtggcgtacaaccggaaaaatgtgtaccgctggccgatcatcagtctttgaaccatgcggatgtcagtgcgttggtaagcgccgggcaaacgctggtaatgactgaaaaagatgcggtgaaatgccgggcctttgcagaagaaaattggtggtatttgcctgtagacgcacagcttagtggtgatgaaccagcgaaactgcttacgcaactaaccttgctggcttctggcaactaattacgccgcggcagcgttcgattgatggagtcatgaatgagcctgccgcacctctcccttgctgatgcgcgtaatcttcaccttgccgcacaaggcctgttaaacaaaccccgccgtcgagcgagcttggaggatattccggcaacgatctcccgcatgtccttgctgcaaatcgataccatcaatattgttgcccgtagtccatatctggtgcttttcagtcgtctgggaaattatcctgcccagtggctggatgagtctctggcgcgtggcgaattaatggaatactgggcgcatgaagcctgctttatgccgcgtagcgactttcgtcttattcgccaccgcatgctggcacctgaaaaaatgggctggaaatacaaagacgcctggatgcaggaacatgaggcggaaattgcacagttaattcagcatattcatgataaggggccggtacgtagtgccgattttgagcatcctcgtaaaggtgcaagcggctggtgggaatggaagccgcataaacggcatctggaaggtttatttactgccggaaaggtgatggtgattgaacggcgcaacttccagcgcgtttatgatttaacccaccgtgtcatgcctgactgggatgatgagcgcgatctcgttagccaaacagaagcagaaatcatcatgctggataacagtgcgcgtagcctgggaatattccgcgaacagtggctggcagattactatcggctgaaacgtccggcactggcggcgtggcgcgaagcgagggctgaacagcagcaaatcattgctgtgcatgttgaaaaattgggcaatctttggctgcatgatgatttgctgccgctactcgagcgagcgctggccggaaagctcactgcaacgcacagcgcggtacttagcccttttgatcctgttgtctgggatcgcaaacgcgcagagcagctttttgattttagctaccggctggagtgctataccccagcgccgaaacgccagtatggctattttgttctgccgttattacatcgtgggcaattagttgggcgaatggatgccaaaatgcatcgccagacaggcatccttgaagttatctctctgtggttacaggaaggtattaaaccaacgacaacgctgcaaaaagggctacgtcaggcgattactgatttcgctaactggcagcaggcaacgcgggtgacattaggatgctgcccgcaaggcctctttactgattgccgcaccggctgggaaatagaccccgtcgcataaatgattatgataagatttatgcattcataacccgatccatctggaggaactatggatcatcgtctgcttgaaatcattgcctgcccggtttgcaacggaaaactttggtataaccaggaaaaacaagagcttatttgcaaactggacaacctcgctttcccgctgcgtgatggcattccagtgttgctggaaacggaagcccgcgtgctgactgctgatgagagtaaaagttgatgtaaactgctgatgagagtaaatcatgagttttgtggtcattattcccgcgcgctacgcgtccacgcgtctgcccggtaaaccattggttgatattaacggcaaacccatgattgttcatgttcttgaacgcgcgcgtgaaagtggtgccgagcgcatcatcgtggcaaccgatcatgaggatgttgcccgcgccgttgaagccgctggcggtgaagtatgtatgacgcgcgccgatcatcagagtggaacagaacgtctggcggaagttgtcgaaaaatgcgcattcagcgacgacacggtgatcgttaatgtgcagggtgatgaaccgatgatccctgcgacaatcattcgtcaggttgctgataacctcgctcagcgtcaggtgggtatggcgactctggcggtgccaatccacaatgcggaagaagcgtttaacccgaatgcggtgaaagtggttctcgacgctgaagggtatgcactgtacttctctcgcgccaccattccttgggatcgtgatcgttttgcagaaggccttgaaaccgttggcgataacttcctgcgtcatcttggtatttatggctaccgtgcaggctttatccgtcgttacgtcaactggcagccaagtccgttagaacacatcgaaatgttagagcagcttcgtgttctgtggtacggcgaaaaaatccatgttgctgttgctcaggaagttcctggcacaggtgtggatacccctgaagatcttgagcgcgttcgcgctgaaatgcgctaatttcacttcacgacacttcagccaattttgggaggagtgtcgtaccgttacgattttcctcaatttttcttttcaacaattgatctcattcaggtgacatcttttatattggcgctcattatgaaagcagtagcttttatgagggtaatctgaatggaacagctgcgtgccgaattaagccatttactgggcgaaaaactcagtcgtattgagtgcgtcaatgaaaaagcggatacggcgttgtgggctttgtatgacagccagggaaacccaatgccgttaatggcaagaagctttagtacgcccggaaaagcccgacaactggcatggaaaaccaccatgctggcaagaagtgggactgtccgtatgccgactatttatggtgtgatgacgcatgaagaacaccccggccccgatgtcctgctactggagcggatgcgtggtgttagcgtggaggcaccagcccgaacaccagaacgctgggaacaactcaaagaccaaatcgttgaagccttactggcctggcaccgtcaggacagtcgcggttgcgtcggcgcggtcgacaatactcaggaaaatttctggcccagttggtaccggcaacatgttgaagtgctatggaccacgctcaatcagttcaataacaccggtctgacgatgcaggataagcggatcctgtttcgcactcgcgaatgtctcccggcattatttgaaggctttaacgacaattgtgtgctgattcacggtaacttctgtttacgcagcatgttgaaagatagccgcagcgatcagttactggcgatggtcgggccgggactaatgctttgggcaccgcgagaatacgaactgttccgactaatggataattctctggcggaagatttgctctggagttacctgcaacgcgcgccagtggcggagagcttcatctggcggcgttggttgtatgtgttatgggatgaagttgcgcaactggttaataccggacgatttagtcggcgcaacttcgatctggcaagtaaaagtctcttgccgtggctcgcctgatcactcttgccgtggctcgccactgctaccttttagccactgccagatacggccaagcgtttcatagccaacacgatcgctatgcatcaaccagaccggagaagggattgcccgttcccacgggttaagcgggctgtcgatggccaactgattcgccggggctggtagcggatttaacccttcctgctgaaaaaagatcatcgcccgcggcagatgacttgcggaggtcaccagcaggaaaggggcgtcaccaatcgcctgtttcactgctgcagcttcttcttcggtatcttttggcaaatccagggtgataatttgctcgcgcggcacgcccaggctttgcgcaactctggcacctacttccgctgtactcaccgtattggtttttgctacgcctcccgtgaagatcagtttacttcccggattttcgcgccataagcgaataccttcattcaggcgtggcagactgttattgattaaattagagctcggtgcccactgcgggttccaggtataaccacctccgagcaccacgatatagtccactttttggctattattccatgtcggataggtgctttcgatgggacgcagcaggcggtcggctaccggttgcaaactcaataacaagagcgccagccacccaatgctaataaaaatcttcccggttttttgaaaacggctaaaccacagcagcgccaggccagcgccaataatcaacaacatcagcggaagtggcagcaacatattgccaatcacttttttcagtgtaaaaagcatcctttctggttccttttttaaccatatagcaagggatcgccagcgatattacaccagacgggttcattctcgccgtggctgtgacaaaatagcgtctttatcagaaaacgtcttagccaaccggtggagaaagcaatgcaggatcgcaattttgatgatattgcggaaaagttttcccgtaacatttacggcaccaccaaagggcagcttcgacaggctattctgtggcaggatctcgatcgcgtgctggcggaaatgggcccgcaaaaactgcgtgtgctggatgctggcggtggagaagggcagaccgcaatcaaaatggccgagcgtgggcatcaggtcattttatgcgatctttctgcgcagatgatcgaccgcgcaaaacaggcggcagaagcaaaaggtgtgagcgacaacatgcaatttatacattgcgccgctcaggatgttgctagccatttggaaacgcccgttgatctgatattgttccatgcggtgctcgagtgggtggctgatccccgcagcgtattgcagaccctctggagtgtgttgcgtccaggcggcgtgttgagcttaatgttctacaatgcgcatggtttgttgatgcataacatggtcgccgggaattttgattacgtgcaggcgggaatgccgaaaaagaaaaaacggacgcttagcccagattatccacgcgacccggcgcaggtttatctgtggctggaagaagctggttggcaaattatgggtaagacaggcgttcgcgtgtttcatgattatctgcgcgagaaacaccagcagcgcgactgctatgaagcattacttgaattagaaacgcgttattgccgtcaggaaccgtatattaccctggggcgttatattcatgtcaccgcgcgcaaaccgcagagcaaggataaagtatgagtgaattttcccagacagtccccgaactggttgcctgggccagaaaaaatgacttctccatcagcctgccggtagaccgactctcttttctgctggcggttgccacgctgaacggcgagcgtctggatggtgagatgagtgaaggcgagctggtggatgcattccgccatgtgagtgatgcgtttgagcaaaccagcgaaaccatcggcgtgcgcgccaataacgcgatcaacgacatggtgcgtcaacgtctgctgaaccgctttaccagcgagcaggcggaagggaacgcaatttaccgtctgacgccgctcggcatcggcattactgactactacatccgtcagcgcgagttttctacgctgcgtctttctatgcagttgagcattgtggcgggtgagctcaaacgcgcagcagatgccgccgaagagggcggtgatgaatttcactggcaccgtaatgtctatgcgccactgaaatatagcgtagcagaaattttcgacagtatcgacctgacgcaacgtctgatggacgaacagcagcagcaggtgaaggacgatatcgcccagttgctgaacaaagactggcgggcggcgatttccagctgtgaattgttgcttagcgaaacttccggaacgctgcgtgaattgcaggatacgctggaagcggcaggcgacaaattgcaggctaatctgttgcgcattcaggatgcgacgatgacccatgacgatctgcatttcgtcgatcgtctggtgttcgatctgcagagcaaactcgatcgtattatcagttggggccagcaatccatcgacttgtggattggctacgaccgccacgtacacaaatttattcgtaccgcgatcgatatggataaaaaccgcgtctttgctcagcggttacgtcagagcgtacaaacctattttgatgagccgtgggcgctaacttatgccaatgccgatcgtctgctggatatgcgtgacgaagagatggcactgcgcgatgaagaagtgactggggaacttcctgaggatctggaatacgaagagtttaacgagatccgcgaacagctggcggcgatcatcgaagaacaacttgccgtgtacaaaaccagacaagtgccgctggatcttggtctggtggtacgcgaatatctgagtcagtatccgcgtgcacgtcactttgacgttgcgcgtattgttattgatcaggcggtacgtcttggcgtagcgcaagcagatttcaccggactgccagcgaaatggcagccgattaatgattacggagccaaggtacaggcgcatgtcatcgacaaatattgaacaagtgatgccggttaagctggcgcaggcgctggcgaatccgttatttccggcgctggacagcgccttacgtagtggacgccatattggcctcgacgaactggataatcatgcattcctgatggattttcaggaatatctggaagagttttacgcgcgttataacgttgagcttattcgcgcaccagaagggttcttctatttacgcccacgttccaccacgctgatccctcgttccgtcttgagcgaactggatatgatggtcgggaaaatcctctgttatctctatctcagcccggaacggctggcgaatgaggggattttcacccagcaggaactgtacgacgaactgctcaccctggccgatgaagcaaaactgctgaaactggtgaacaaccgtagtaccggtagtgacgttgaccgtcagaagttgcaggagaaagtacgttctagcctcaaccgtctgcgtcgtttaggcatggtgtggtttatgggccacgacagcagcaagtttcgcattaccgaaagcgtgttccgcttcggagccgatgtgcgtgctggcgacgatccccgtgaagcacagcgtcgcctgattcgtgatggcgaagcaatgccgattgaaaatcatctgcaactcaacgatgaaaccgaagagaatcagccagatagcggagaggaagaataatgattgaacgcggtaaatttcgcagtctgacgctgattaactggaacggcttttttgcccgaacttttgaccttgacgagctggtcacgacgctttctggcggtaacggggcgggtaaatccaccaccatggcggcgttcgttacggcgctgatccccgacctgaccctgctgcatttccgtaacactacggaagccggggccaccagcggtagccgcgataaaggtctgcacggtaagctgaaagcgggtgtctgttatagcatgctcgacaccattaacagccgccaccagcgcgtggtggtcggtgtgcgtctgcaacaggttgccggacgcgatcgtaaagtggatatcaagccgtttgccattcagggactgccgatgagcgtgcagccgacacagctggtgaccgaaaccctgaacgaacgccaggcgcgcgtgctgccgcttaacgagctgaaagacaagctcgaggcgatggaaggcgtgcagtttaaacagttcaactccattactgattaccacagcctgatgttcgatctgggcatcatcgcgcgtcgtctgcgctccgcatctgaccgtagcaaattctatcgtctgatcgaagctagcctgtatggcgggatctccagtgccattacccgttctctgcgcgactacctgttgccagaaaacagcggcgtgcgtaaagcgttccaggacatggaagcggcgctgcgtgaaaaccgtatgacgctggaagcgattcgtgtcacccagagcgaccgcgacctgtttaagcatctgatcagcgaagccaccaactacgtggcggcggactacatgcgtcacgccaacgagcgccgtgtccatctcgacaaagccctggagtttcgtcgcgagctacatactagccgtcagcaactggcggctgagcagtacaaacacgtcgatatggcgcgtgagctggcagagcacaacggtgccgaaggcgatctggaagcggattatcaggcggccagtgatcacctgaacctggtgcaaaccgcactgcgtcagcaggagaagatcgaacgctacgaagcggatctcgatgagctgcagatccgtctggaagagcaaaatgaagtggtggcagaagccatcgaacgccagcaagagaatgaggctcgtgcggaagctgccgaactggaagtggacgagctgaaaagccagcttgctgactaccagcaggcgctggacgtccagcaaacgcgcgcgatccagtataaccaggcgattgctgcgcttaatcgtgccaaagaactgtgccatctgccggacttaaccgccgactgcgccgccgaatggctggaaaccttccaggcgaaagagctggaagcgactgaaaaaatgctctctcttgagcagaaaatgagcatggcgcaaaccgcgcacagccagtttgagcaggcttatcagctggtggtggcaatcaacggcccactggcgcgtaacgaggcgtgggatgtcgctcgcgaactattgcgcgaaggggtcgatcagcgtcacctggcagagcaggttcagccgctgcggatgcgattaagcgaactggaacagcgtctacgcgagcagcaagaagctgagcgtctgctggcagatttctgcaaacgtcagggcaagaattttgatatcgacgaactggaagccctgcatcaggaactggaagcacgcattgcctctctttccgatagcgtgtctaacgcccgtgaagagcgcatggcactgcgccaggagcaggaacagctgcagtctcgcattcagagtttgatgcagcgtgcgccggtttggctggcagcgcaaaacagtctcaaccagttgagcgaacagtgcggcgaagagtttacctccagccaggacgtcaccgaatatctgcaacagttgctggagcgtgagcgagaggcgattgttgaacgcgatgaagtgggcgcgcgcaaaaacgccgtcgatgaagagatcgaacgtttaagccagcctggcggctctgaagatcagcgtctgaacgcgctggcggagcgttttggtggtgtgctgctgagtgaaatttatgacgacgttagcctggaagatgcgccgtacttcagtgcgctgtatggcccgagtcgccacgccatcgtggtgccagatctgagtcaggtaactgaacacctggaaggcttgaccgattgcccggaagatctctatctgatcgaaggagatccgcagagtttcgatgacagcgtgttcagcgttgatgagctggaaaaagcggtagtggtgaaaatcgccgatcgtcagtggcgttatagtcgtttcccggaagtgccgctgtttggtcgtgctgcgcgtgaaagccgtattgaaagcctccatgccgagcgtgaagtgctttccgaacgcttcgccacgctctcctttgatgtacagaaaactcagcgtctgcatcaggcgttcagccgctttatcggcagtcatctggcggttgcgtttgagtctgacccggaagcagaaatccgtcaactgaacagccgtcgcgtcgaactggagcgggcgttaagtaatcatgaaaatgataaccagcagcagcgtattcagtttgagcaggcgaaagagggcgttacggcgctgaaccgcattctgccgcgtctcaacctgttggctgatgacagcctggcggatcgcgtcgatgaaatccgcgaacgtctggatgaagcccaggaagccgcgcgttttgttcagcagtttggcaatcaactggcgaaactggaaccgattgttagcgtattgcagagcgacccggaacagttcgaacagttaaaagaagattacgcgtactctcagcagatgcagcgcgatgcccgtcagcaggcgtttgccctgacggaagtggtgcagcgtcgtgcgcactttagctattctgacagcgcagaaatgcttagcggtaacagcgatctcaacgaaaaactgcgtgaacgtctggaacaggcggaagcggagcgtacccgcgctcgcgaagcgttgcgcggtcacgcagcgcagttgagtcagtacaaccaggtgctggctagcctgaaaagttcttacgacaccaaaaaagagctactcaacgatctgcaacgtgaattgcaggatatcggcgtgcgtgctgatagcggggcagaagagcgggcgcgtattcgccgtgacgagctgcatgcgcaactgagcaataaccgtagtcgccgcaatcaactggaaaaagcgcttaccttctgcgaagcggagatggacaacctgacccgcaaactgcgcaagctggagcgggattactttgagatgcgcgagcaggtagtgaccgccaaagcgggctggtgtgcggtgatgcgcatggtgaaagataacggcgttgagcgccgcttacaccgtcgtgagctggcttatctctccgctgatgatttgcgttccatgagcgataaggcgttaggtgcgctgcgtctggcggtggcggataacgaacatctgcgcgacgtgctgcgcatgagcgaagatccgaaacgtccggagcgtaaaattcagttcttcgtggcggtttatcagcatctgcgtgaacgtattcgtcaggatattattcgtaccgatgatccggtggaagctatcgaacagatggagattgaacttagccgtctgaccgaagaattaacctcccgtgaacagaaactggcgatcagttcccgcagcgtggcgaacatcattcgcaaaaccattcagcgcgagcagaaccgtatccgtatgctcaaccaggggttgcagaacgtaagctttggtcaggtgaacagcgtgcgtctcaacgtgaacgtgcgtgaaacgcacgccatgctactggatgtgctctctgaacagcacgagcagcatcaggatctgtttaacagcaaccgtttgaccttcagcgaagcgctggcgaaactgtatcaacgtcttaacccgcagattgatatggggcagcgcacgccgcagaccatcggtgaagaactgctggattaccgcaactatctggaaatggaagttgaggttaaccgtggttccgatggctggctgcgcgcagagtctggtgcattgagcaccggtgaggcgattggtaccggtatgagcattctggtgatggtggtacaaagctgggaagatgaatctcgccgcctgcgcggtaaagatatctctccttgccgcctgctgttcctcgatgaagcagcgcgactggatgctcgttctatcgccacgctgtttgaattgtgtgagcgtttgcaaatgcaactcatcatcgcagcgccggaaaatatcagcccggagaaaggcaccacctataaactggtgcgtaaagtcttccagaataccgaacacgttcatgtcgtcggcctgcgaggatttgcgccgcaactccctgaaacgcttccaggaactgacgaagcgccttctcaggcgagttaaaattaaggcggcagcaatgccgccttttctttttccgaaaactccgtttctgcactaaaaaagtggcacattacggcgcgcttttctttaaacttctttacattaggttatgtaaaaacgtatcggcgtttatatactgaagataagcctgatgagtaacaggcttgctcgtcatactttcgtgagtattggcgttgtacaggcaagtcgtaaaataacagcctggctattcagagtatgataaaaacagggggcaagggatgttgcttaatatgatgtgtggtcgtcagctgagcgcaatcagtttgtgcctggccgtaacattcgctccactgttcaatgcgcaggccgatgagcctgaagtaatccctggcgacagcccggtggctgtcagtgaacagggcgaggcactgccgcaggcgcaagccacggcaataatggcggggatccagccattgcctgaaggtgcggcagaaaaagcccgcacgcaaatcgaatctcaattacccgcaggttacaagccggtttatcttaaccagcttcaactgttgtatgccgcacgcgatatgcaacccatgtgggaaaaccgtgatgctgttaaagccttccagcaacagctggcagaggtggcgattgccggtttccagccgcagtttaataaatgggtagagttactgaccgatcctggtgttaacgggatggcacgcgacgtggtgctctctgatgcgatgatgggctatctccatttcattgcaaatattccggtcaaaggcactcgctggctatatagcagtaaaccttatgcacttgcaacgccgccgctcagcgtgattaaccaatggcagctggcgctggataaaggtcaattgcctacgtttgttgcaggactggcaccgcagcatccgcaatatgcggcgatgcatgaaagcttactggccttactctgtgacaccaaaccgtggccccaactgaccggcaaagcaacgttgcgcccagggcagtggagtaacgacgtaccggcgttgcgcgaaatattgcaacgcacaggcatgttggacggggggccgaaaattactctacctggcgatgacacgccaactgacgcggtagtcagcccatccgctgttactgttgaaacagcagaaactaagccgatggataagcaaacgacgtctcgtagtaaacctgcgcctgccgttcgcgccgcctacgataatgaactggtggaagccgttaaacgttttcaggcatggcaaggattgggggcagatggtgctattggcccggcaacacgtgactggttaaacgtaacgcccgcccagcgtgctggtgtgttggctctcaacatccagcgattgcgcttgctgccaacagagctttctaccgggatcatggttaacattccggcctatagcctggtctactatcagaacggcaatcaggtgctggatagccgagtcattgtcggtcgccccgatcgcaaaacgccgatgatgagcagtgcccttaacaacgtagtggtaaacccgccgtggaacgtacctccaactctggcacgcaaagatattctgccaaaagtgcgcaacgatccgggatatctcgaaagccatggctatacggtgatgcgcggctggaacagcagagaagcgattgacccatggcaggttgactggtctacaatcacggccagcaatttaccgttccgcttccagcaggctccaggcccacggaacagcctggggcgctataaattcaatatgccgagtagtgaggccatttatttgcatgacacgccgaaccacaatctgttcaagcgtgatacacgcgcattgagcagtggctgtgtacgagtgaataaagcttccgatctggcgaatatgctgttgcaggatgcaggctggaatgacaaacgtatttctgatgcgctgaagcagggtgatacacgttacgtcaatattcggcagagcattccggtgaatctctactacctgacggcctttgttggtgcagatggtcgtacccagtatcgtacagatatttacaattatgatctgcctgcgcgatccagcagccaaatcgtaagcaaagcggaacaattaatcaggtaaatgaagtagttcggggaaatcagttgtcgtaataattagcatgattgggggcgattctctgcagcccccgtcactgctggggttgagtcatcttgacgtctgctttacgggcggttaaggtgcctcttgtgcgccagaagtgcatataaacgataacattgacctgtagacttgattatcatggacaaattcgacgctaatcgccgcaaattgctggcgcttggtggcgttgcactcggtgccgccatcctgccgacccctgcgtttgcaacactctctaccccacgcccgcgcattttgacactcaataatcttcataccggagagagtatcaaagcggagtttttcgatggcagaggctatattcaggaagaattggcaaaacttaaccattttttccgcgattaccgcgcgaacaaaataaagtccatcgacccaggattattcgaccagttgtatcgcctgcaagggttgttaggcacgcgcaaaccggtgcaactcatttccggttatcgttctattgataccaacaatgaactacgcgcccgcagccgtggagtagcgaagaaaagctatcacactaaaggccaggcgatggatttccatattgaaggtatcgcgttaagcaatattcgcaaagccgcgttatctatgcgcgcaggtggtgtaggatattatccacgtagtaactttgtgcatattgataccgggccagcacggcactggtaataattgcttaacgaaacaggggcagtatgaactatcgtattattccggtcaccgcattctcccagaactgtagtttaatctggtgtgaacaaacccgtctggccgcactggtcgatcctggcggcgatgcggaaaaaatcaaacaggaagttgatgacagcggcctgacactgatgcagatcctgctgacgcatggtcatctggaccacgttggcgcagcggcggaactggcgcaacattacggcgtgccggttttcggcccggaaaaagaagatgagttctggctgcaaggcttgcctgcgcaaagtcgtatgtttggtctggaagagtgccagccgctgacgccagatcgttggctgaacgaaggcgataccatcagcatagggaatgtgactttacaggtgttacattgccctgggcatacgccgggtcatgtcgtgttttttgatgatcgggcaaagctgctgatttctggcgatgttattttcaaaggcggagtagggcgcagtgacttcccgcgtggcgatcataatcaactgatttctagtatcaaagataaattgctgccactgggggatgacgtgatatttattccgggtcacggaccattatccacacttggttatgaacgcctgcataatcccttcctgcaagacgaaatgcccgtctggtaaggcacataaaaaagcccgcttttaatgctggcctggatttctggcaaagtgcgctttgtttatgccggatgcggcacgagcgccttatccggcctacaaaatcgtgcaaattcaaaatattgcaggggacgcgtaggcctgataagcgtagcgcatcaggcaatgttgcgtttgtcatcagtctcagcccgcttttcagcgggcttcattgtttttaatgcttacagcactgccacaatcgcttcgcacagcggagccatgttatctggtgtcatcccggccacatttacgcgaccagaagcaaccgcatatacgccaaactcttcgcgcagacgcagcacttgttcttttgtcaggccactgaaggagaacatgccgttctgtttgatgataaagctgaagtcgcggtttgcgcctttttcctgcagcgtattgacgaacaactgacgcatacgctgaatacgctggcgcatatcagtcagctcttgttcccaaatcgcacgtaacgcatcgttgctcaggatggtggcaacaacagaagcgccgtgtgctggtgggttagagtagttagcgcgaatcgccgctttcatttggctgaatgcgcgatcaacggtttcactgtcggcagcaaccagagtacaagcgccaacacgctcgttgtacaggccaaagtttttagagtaggaactggcaacaatcagctctttatgcatagccgcgaaagcgcgcagtccttcagcatcttcttccagaccacgggcaaaaccctggtaagcgaagtcaaacagcggtaaccagcctttctcaacggagagttgtgccagtgtttgccattgttccagcgtagggtcgataccggttgggttatggcagcagccatggaacagcactacgtcgccagcctgagcttcattcaggctgttaatcagtgcatcgaagtcaagagtgtgattttccgcatcataataagcgtattcacgaacttccagacctgcagagttaaagacgctcttatggttcggccagcttgggttgctcacccacacacgcttaacgctggtattttttgccaggaaatcggcagccacgcgtagtgcgccagtgccccccggagtctgtgccgtgcgagcacgtttgtcattgatcagggcgctacctttaccaaacagcagttcctgagtgcagcgaccaaattcagggatgccgtcaatgccgaggtaatttttggtggtttcattttcgagcagatactgttcagcctttttcacgctggtcagtaccggggttttgcccgtctcatctttatagacaccaatcccgaggttaattttgccgggacgttcatcggcacgaaacagatcggccaggcccagaatcgggtcggcaggagcggcggtaatgttctcaaacatgacgaggttccattatggttacagaagggaagtccgctatcagggtaacgggagatttacaaaattccaactattactgatgaaaacgcaggctgtttttgcaagacgtgagattgctctggaaggtataaaaaaaacaggaccaaagtcctgttttttcggcatttaacaaagaggtgtgctattagaactggtaaacgatacccacagcaacggtgtcgtcactacctacgcccagtttgttgtcagaatcgatctggttgatgatgtagtcaacataggtggacatgtttttgttgaagtagtaggttgcgcccacttcaaagtagttcaccagatcaacatcaccgataccttctacgtctttcgctttagatttggtgtaagcgatggacggacgcagaccgaaatcgaactggtattgcgcaactaacagaacgtcttgcgttttgttggcgaagccgctggtgtttgtaaatttattagtgatcggcgtagcgttacgggtttcaccgtagttcgctgccaggtagatgttgttcgcgtcgtacttcagaccagtagcccactgttcagcttttttaccgttgccaagaggttgagcttcttgcaggttggtacggtcagctgcaccataagcaccaacgataccaaagccttcgtattcgtagctgatagaaccgccaacaccgtcgccgttagaacggcgtgcagtgtcacgctcgtttttacccaggtactgaacagcgaagttcaggccatcaaccagaccaaagaagttggagttacgataggtagcaacgccgccaacacgaccaacgaagaagtcatcgctgtatgcagtatcaccaccaaattctggcagcatatcggtgtaacccagtgcatcataaaccacaccgtagttacggccgtaatcgaaagaaccaacgtcagcgtatttaagacccgcgaatgccagacgcgttttgttaccagtttgagcgtcagcgccttcagagttgttaccctggaagttatattcccactgaccataaccggtcagatcggaattgatttgagtttcccctttaaaaccaagacgggcataggtcatgtcgccattgccaccgtaactgttttcaccgttacccttggaaaaataatgcagaccaacagctttaccgtacagatctactttgttgccatctttgttatagatttctgcagcgtttgcagtacctgctactaacagagcagggacgatcactgccagaatattgcgcttcatcattatttattaccctcatggttttttttatgacacctgccactgccgtcaataagttctgtcaataaaaatttacggaactattgatgagagtttggtgtctttatgtgtctgcaggcatctttccattcaaactaacgtttcgctaccgtgaaagtgctacaaagataaagatttggtttcaaaaagaaaaaatatgtaaccaaaagtaaaatttaaggaactttgtgaacaccgtcatatttccatagagacgtgatgatatttacagcaattttaatctatttatatgatttccttatatttaaattaactaaacggaaattttgtttctgatggaaactttatcgacctggcacaaaatcttctttcagacatccagaatgccaaaaaatagtatgaaaattgtgctattagctaagaaaaaactaatccgcaataagaatgcggattagtttttgcgcgtaaatgttgcaatgtaatattccgtaacaggatgatcgttatggcggggttgcaaatagattgcttgacttaacaaacagataacttgacagaaaagataaaaaaagagccagcgggcgctggctcttgaagacgctaaattagaagctggcgttacgcggagtacgtgggaacggaatcacatcacgtacgttttgcacgccagttacgtaagcaatcagacgttcaaaaccaagaccgaaaccactatgcggaacagtaccgtagcgacgcagatcgcgataccaccagtaatcttctttattcaggcccatttccagcatacgctcgtccagcacgtccagacgttcttcacgctgggagccaccaatgatctcaccgatgcccggagccagaacgtccatagccgcaacggttttaccgtcttcgttaaggcgcatatagaacgctttaatatctttcggatagtttttaaccactaccggtgctttaaagtgttcttccgccagataacgctcatgctcagaagagagatcgactccccagtaaaccgggttttcaaacttcctgccgcagttttcgagaatggtcactgcgtcggtataatccacctgcgcaaaatcggcttcaatgaagcgttccagacgactaacggcatctttatctacgcgttcagcgaagaatttcatgtcgtcagcgcgttcttcgagaaccgctttgaagacatatttcagcatggcttcagccagacccgcaatatcgttcaggttagcaaacgccacttccggctccagcatccagaattccgccaggtgacggctggtgttggagttttcagcacggaaagtcgggccgaaggtataaattttggacaatgcgcaagcgtaggtttcgccgttcaactggccagatacggtcaggaaagactctttaccaaagaagtctttgtcgaaatccactttgccctgatcgttacgcggcaggttttccagatccagcgtagaaacgcggaacatttcgcctgcaccttcggtatcagatgcggtaatcagactcgtactaacccagaagaatccctgctcgttaaagaagcgatgcagcgcctgcgccagcgtatggcgaacgcgcgcgacggcaccaatcaggtttgtgcgcggacgcaggtgagcgacttcacgcagatactcaatgctgtggcgttttgccgccatcgggtaagtgtctggatcttcaacccaaccagcaacttcaaccttgctggcctgaatttcaaattgttgcccctggcccgggctcgccacgactttacccgtcacaatgacgctgcagccggtggtcagacgcaggacgtcttcattgtaattgggcagagaattattgatgacagcctgtacaggatcaaagcaggaaccgtcataaacggcgaggaaggagatgccagctttactatctcggcgggtacgtacccatccgcgcacggtgacttcgctgtcaacggctacacggccctggagtacgtcggctacaggcacaacgctcataatattctctctgttaatagtcggaaaaaataaacacttgtccacccgtaaatggggggatacctatgttacctggcatctgcaatcagacaagcagaattcgcaaatgcagcgaaagatttcggaattaaaggtaaaaaaagggagccgattagctccctgatgatattaactggcttttttaatatgcggaaggtcgaacgctttgcgcagcgcccgaacaaacgctttatcatggcagatagttttgccagggctgtcagaaagtttcgccaccggtttaccgttacactctaccaacttaatgacaatattcaggggttttacctgggggatatcgcaggtcaggcgagtcccaataccaaaacttaattgcacgcgggaagagaagtggcggtatagctcaaccgctttgcgtaaatccagattgtcagagaaaaccagcgttttactctgtggatcaattcccagcttttcataatgtgcaatggctttttcaccccattcaaccgggtcgccagagtcatgacgcaggccctgataccgactagcgaactcgacaccgaaatcacgcaggaaagcatccatagtgatgcagtcggttaatgcaatgccaagttggtcgggatactcttccagccaggcagcaagtgcagctcgctggctgttggctagatccgggctgatttgctgatgtgcctggaaccattcgtgtgcctgtgttcccatcggcgtgagggaaagccgacgcgccagatcgtagttgctggtgcccacaaaccaggattcctgttgcagacgcttaacgatggtttcttgtacttcgcgagaaaaacggcgacgggtgccaaaatccatcagatggaagcggctcatatcaagaccggcggttaacgcgctgaagtcgactaatttgctttccagcgtgtcgagggcttgcgcaacgtcggcctgcggactgcgatagcgatgtaccatttcactgataaccgccagcaaaggaacttcccagaggatgacttcacgccacgggccgcttaaacgaatatccagcttgccattatcgttggacacggtgacttgttccgggttaaagcggaactcgcgtaaccagttaagatagtcggccttaaagaaaggcagggcagaaagccactgatattcatcatcctgcaggcgcaggtgctgcatcgcctgaacctgttcacgaatagcatcggcataaatacccagcagatcgtcacctcggcaacgaaactccgccgcgacatgcacatcgtaatagtgatgaaacacggcttgctgcatatgcaacttataagcatctgtatccagcaagctgtgcagaacaggagaagcgaattgtgtcataggtgcgcagtagcgtcctcgtacaggagcgtttagtacaataaacatcttcaggaactgctggagtataccttgtttcgcaatttattgaaccccgatcacaccatatgccacctttctggtcgatggcattacgcggtgtatgttataaaaatgtagcaataaaggcgtttgtacctgaaaagatgaagattctgcatagcgcgatttacgcaacaggaatagactgaacaccagactctataaaagatgctaaaggttatttatgactcaacagccacaagccaaataccgtcacgattatcgtgcgccggattaccagattactgatattgacttgacctttgacctcgacgcgcaaaagacggtcgttaccgcggtcagccaggctgtccgtcatggtgcaagtgatgctccccttcgtctcaacggcgaagacctcaaactggtttctgttcatattaatgatgagccgtggaccgcctggaaagaagaagagggcgcactggttatcagtaatttgccggagcgttttacgcttaagatcattaatgaaataagcccggcggcgaataccgcgctggaagggctttatcagagtggcgatgcgctttgcacccagtgtgaagccgaaggtttccgccatattacgtattatctcgaccgcccggacgtgctggcgcgttttaccaccaaaattattgccgataaaatcaaatatcccttcctgctttccaatggtaaccgcgttgcgcaaggcgaactggaaaacggacgccattgggtacagtggcaggacccgttcccgaaaccgtgctacctgtttgcgctggtggcaggcgactttgatgtactgcgcgatacctttaccacgcgttctggtcgcgaagtagcactggagctgtacgtcgatcgcggcaaccttgatcgcgcgccgtgggcgatgaccagcctgaaaaactccatgaaatgggatgaagaacgctttggcctggagtatgacctcgacatctatatgatcgtcgcggtggatttcttcaatatgggcgcaatggagaataaggggctgaatatctttaactccaaatatgtgctggcccgcaccgacaccgccaccgacaaagattacctcgatattgaacgcgttatcggccatgaatatttccataactggaccggtaaccgagtgacctgtcgcgactggttccagctcagcctgaaagaaggtttaaccgtcttccgcgatcaggagttcagctctgaccttggttcccgcgcagttaaccgcatcaataatgtacgcaccatgcgcggattgcagtttgcagaagacgccagcccgatggcgcacccgatccgcccggatatggtcattgagatgaacaacttctacaccctgaccgtttacgagaagggcgcggaagtgattcgcatgatccacaccctgcttggcgaagaaaacttccagaaagggatgcagctttatttcgagcgtcatgatggtagtgcagcgacctgtgacgactttgtgcaggcgatggaagatgcgagcaatgtcgatctctcccatttccgccgttggtacagccagtccggtacaccgattgtgaccgtcaaagacgactacaatccggaaaccgagcagtacaccctgaccatcagccagcgcacgccagccacgccggatcaggcagaaaaacagccgctgcatattccgtttgccatcgaactgtatgataacgaaggcaaagtgatcccgttgcagaaaggcggtcatccggtgaattccgtgctgaacgtcactcaggcggaacagacctttgtctttgataatgtctacttccagccggtgcctgcgctgctgtgcgaattctctgcgccagtgaaactggaatataagtggagcgatcagcaactgaccttcctgatgcgtcatgcgcgtaatgatttctcccgctgggatgcggcgcaaagtttgctggcaacctacatcaagctgaacgtcgcgcgtcatcagcaaggtcagccgctgtctctgccggtgcatgtggctgatgctttccgcgcggtactgcttgatgagaagattgatccagcgctggcggcagaaatcctgacgctgccttctgtcaatgaaatggctgaattgttcgatatcatcgacccgattgctattgccgaagtacgcgaagcactcactcgtactctggcgactgaactggcggatgagctactggctatttacaacgcgaattaccagagcgagtaccgtgttgagcatgaagatattgcaaaacgcactctgcgtaatgcctgcctgcgtttcctcgcttttggtgaaacgcatctggctgatgtgctggtgagcaagcagttccacgaagcaaacaatatgactgatgcgctggcggcgctttctgcggcggttgccgcacagctgccttgccgtgacgcgctgatgcaggagtacgacgacaagtggcatcagaacggtctggtgatggataaatggtttatcctgcaagccaccagcccggcggcgaatgtgctggagacggtgcgcggcctgttgcagcatcgcagttttaccatgagcaacccgaaccgtattcgtagcttgattggcgcgtttgcgggcagcaatccggcagcgttccatgccgaagatggcagcggttacctgttcctggtggaaatgcttaccgacctcaacagccgtaacccgcaggtggctagtcgtctgattgaaccgctgattcgcctgaaacgttacgatgccaaacgtcaggagaaaatgcgcgcggcgctggaacagttgaaagggctggaaaatctctctggcgatctgtacgagaagataactaaagcactggcttgataaataaccgaatggcggcaatagcgccgccattcggggaatttacccctgttttctcaggcgagtttcagattcaccacgttgcatcacccgttgcaacacctccgcttccagctccgctaatcgcacgctccctaatcgacgcggacgggggatatccactgtcaaatccagaccaatttttccctcttcaattaacagcacccggtcagccatcgctaccgcttcgctcacatcatgcgtcaccaacagtacggtaaagccgtgctcctgccaaagactcacaatcaaatcctgcatctcgagtcgcgttaaggcgtccagcgccccgagcggttcatcaagcaacaataatcccggtcgatgaatcaacgctcttgccagcgccactcgctgtttctgcccgccagaaagtgcggcaggccattcccctgcgcgattctccagtcctaccgcagccaacgctcgacgtgcggcatcgcgccactggcctttaaggcctaacccaacgttatcaatcacgcttttccacggtagcagacgcgcatcctgaaacatcattcgcgtgtcttcctgaatttcagccagcggtgtggtgcccgctaacacatcgcctgcggttggcgtttccagacctgccagcaggcgcagcagggtacttttgccaccaccgctgcggcccaccaccgccacaaactgacctgccggaatatgtaaatccagttggttcaggacgatattttccgcgtaatgtttgcttactgcattgagcaacaatggcgtgccctggttcagacgagcagtattcataccgtggcctccttcaaatgataagccgggttccagcgcaaccagaggcgctctaacagctgcgcgctgacgtcagccagtttgccgagcagggcgtaaagaataatagcgactaccaccacgtccgtttgcaaaaacccccgcgcattcatcgccagataaccaatgccactattggcagaaatggtttcggcaacaatcagcgtcagccacatcaggcccaacgcaaaacgcacgccgaccataatactgggcagggcaccaggcaggatcacatggataaacagcggtatgccggataatccatagctacgcgccatctccaccaacccgcgatcgatattacggatgccatgccaggtgttgatataaatggggaatagcgtaccgagcgccaccagaaagatttttgcggattcatcaatgccaaaccacaaaatcaccagcgggatcagcgccagatgcggcacgttgcgcaacatctgaatactggtatccagcagccgttctccccagcgagatagcccgctaatcagtcccaaaatcaaccccaggcttccgccaatactaaagccaatcagcgcccgccaggagctgatcgccagatgctgccacagttcgccgctggcggagagcgtccagaacgccgtcaccactccttccggactaggcaaaatacgcgtgctcagccagccaacgctggaggccagttgccacaccgccacgatgcccaccggtaaaaaccagggggcaacgcgcaataaccacttcttcactggcgttgccattatttcttccttagctttgcgcgactttacgggggataaaatcattcgccaccgcttcgccttgcggattcagcggctgcggctggggaatttccgggatggcgacatccagaagcgggaacagcaactcgccaacccgatacgcttcttccagatgcggatagccgctaagcacaaaactgtcgatgccaagcgcggcatattcgttgattcgcgcagcgaccgtaggaccatcgcccaccagcgccgtcccggcaccgccgcgcactaagccaacgcccgcccataaattggggctgatctccagattgtcgcgcttgccgttatgtaacgccgccattcgctgttgccctacggaatccgtccgggcgaatgcggcctgtgctttggcgatagtttcatcatcaagatggctgattaaccgctcggcggcctgccacgcttcgtcgttagtttcacgaacaatcacatgcagacgaataccgaaacgaattttgcgtccatgcgcggcagctttcgcccgcacttgttcgattttctctttaaccagttccggcggttcgccccaggtgaggtagagatcaacctgttctgccgccagctcctgggcgacatcactgcttccgccaaagtaaagtggcggatacggctgttgaatcgccgggaagagcagttttgctccgcgcacatgaatatgtttaccgttgaaatcgacggtttctctctgcaataaacgccgccagacctgggtaaattccgcgctggcttcgtagcgctcgctatgatcaaggaacactccgtcgcctgccagctcttgtggatcgctgcctgtgaccaggttaaacaacgcacgtccattactgagacggtcaagcgtggcggcctggcgggcggcaacggtaggactggttacgctgggacgcagggcgacaagaaacttcagccgctgcgtcaccgggatcatgcttgcggcaaccagccacgcatcttcgcaggagcgccccgttggaattagcacaccggtatagccaagacgatccgccgcttgcgcaatttgttgcagataaccgtgatcaaccgggcgactaccttcttccgttcccagataatgcccgtcaccgtgggtcggtaaaaaccagaacatattcagactcataattgttttccttccagttgagtgggctgccagatgcgctggcgaatatcgacttttttcggcaccagacgattttcataaaacagatctgccgtttgctgctgtaaggcggcaacctcggcgttaaccggtttgatggtggtaggagggcgatgatctaagtaagaggcaatcaccggtgccggtaagcccatcgtttttgccagtaaagcgatgctttgctcgcgctggctgcgggttaacgcatcggcctcactaaaggttgccagtacgccctgaataaaagcgccgtttttttctgcatagggacgagctgccagataaaagcttccagtttgattgagatcggtgccgtctttcagcacccgcacgccgccctgtaataatgcagcagagtagtagggatcccagatagcccaggcgtcaacgttaccttgctggaacgcggcgcgggcatcagcgggcgtcaggtaagtgggttggatatcggtaaacttaagtccggcctgacgcagtgcacgcagtaaaaggttgtgactactggaacctttctgaaaggcaactttgtgacctttaagatcggctacggttttgatcgggctgttttctgccaccagaatcacttcggctttgggcttcggtggctcgacgcccacgtacaccaaatcagccccggcagcctgggcaaagattggcggaatatccccggtactgccgagatcaatactgccaacgtttaacgcttccaacatttgcggacccgcggggaactccacccaggagattttactttccggatagcgtttttccagtaactggtggctttttgccagcaccataccaatactgcctttctgatagcctatacgtaacgcttcagggctggattctgcagcaaccgcaaaagtagagacgctaagcaatcccgccagcgccagtttaatgatgttacgcatgggcattacctcgcagagacagaaggtcaggaacctgaacatcgcggcggtgcaatgcctgccagaaagtttctagcgcggtatcaagacgggtttgcagatttggcgtgaactggggtctgtgatggtaatcaattacttgactgtcatcggcaaacacgccgtgcaggatctcctgagctttcagtgcgcttaaaactggtttaagggcataatcgaccgccagcagatgggccacggtaccgcccgtcgccagcggtagcaccactttgccttgcaaagcgcgttctggcagcaggtcgagcagggttttcaacgcaccggaataggcggctttatacacaggcgtggcgacaatcagcccatcggcctgttgcagctgttcggtgaaggtcttgagtgccggactatcgaaacgagcataaagtagatcttccggggcgaagttttgcagattccagtgataaacctctacatccaggccatttagtttttcccgcgcatattccagcaaggagctggagcgagaaggaaagcgaggactacccgccagggtgatgacacgcatactctctccttataaccaattgttctttttttgttaacattgataacaattcggtcagtctgtcggagagacaagaaaattccaaatataaattttgtgtatctttttctgaaaataaactaaagaaagggctttatatatcacgcatatttatttattggatagtcattagatgttgaatcaatgaattactcgttcagttaatatttaaatattcatgaaatctataaattaaagatttgtcacttattggatttagtatgcttgatttaaatggcggacaattattgttattattaagtctaatgtcatttaaaggcattatcatatttacgaagagatcaggatgataacgatgaaaaaaagtgtattgacggcgtttataactgtggtatgtgcaacgtccagcgttatggctgctgatgataatgctatcacggatggcagtgtaacatttaatggtaaagttattgctccagcttgtaccctggtagctgcgacgaaagattccgtggtgactttgccagatgttagtgccacgaagttgcaaaccaatggtcaggtttctggcgtgcaaattgatgtgccaattgaattaaaagattgtgatactaccgtaacaaaaaatgcaacgttcacctttaatggcactgcggatactactcagattacagcgtttgctaaccaggccagttctgatgctgctacaaacgtggccctgcaaatgtatatgaatgatggtacaacggccatcacgccagacacagaaaccgggaacattttgttgcaggatggagatcagacgttgacttttaaagttgattatatcgctacggggaaagcgactagtggtaatgtgaatgcggtaacaaatttccatattaactattattaatagaactcattaattgttttattaattagtacccctccagtgttctggaggggatattcatattttttaagagtgactatttatgaaaacttgcataacaaagggaattgtgaccgtaagtttaacggcaatattactcagctgcagttccgcatgggcggcaggtaaaggcgggattggacttgcagcaacacgtcttgtttatagtgaaggtgaagagcaaattagtctgggtgtacgtaacaccagtccggatgttccttatcttattcagagttgggtgatgaccccagataataaaaaaagtgcagactttattattacaccaccgctatttgtgctgaatccggcaaatgagaatctgttacgcattatgtacattggagcgccgttggcgaaagacagagaaacccttttcttcactagcgtacgggcagtccctagtacaacgaagcggaaagagggaaataccctgaagattgccacacaaagcgtcatcaaacttttctggcgaccaaaaggtttagcgtatcccttaggcgaggctccggcgaaactgcgttgcactagcagtgctgacatggttacggtcagtaacccaacaccttatttcattaccctgacagacctgaaaataggtggaaaagtagttaaaaatcaaatgatttccccctttgataaataccaattttctctgccaaagggggccaaaaatagcagcgtaacgtatcgaaccatcaatgactacggggcggaaacgccgcaactcaactgtaaaagctaagccgtcttcagttaagagagcgagatgtatagaactcatcgacaacacagcctgttaagctctggtggagtgccaagctttattggtgggctggtggtgtttgtgagcgcagcgttcaatgcacaagctgaaacctggttcgatcctgcttttttcaaagatgatcccagtatggtggccgatttgtctcgtttcgaaaaaggacaaaaaataacgccaggggtttatcgtgtcgatattgttctgaatcagacaattgtagatacgcgcaacgtcaattttgttgagataacgccagagaaggggattgccgcctgtttgacgactgaaagcctggatgcaatgggtgttaatactgatgcgtttccggcttttaaacaactggacaaacaagcgtgtgtgccattggcggagattattccggatgccagcgtaacgtttaatgtgaataaactccgtctggaaattagtgtaccgcaaatcgccatcaaaagtaatgcccgtggttatgtcccccctgaacgttgggatgaagggatcaacgcgctattactgggatatagctttagcggggctaacagtattcatagcagcgcagacagtgattctggcgacagctattttctgaatttaaacagtggcgttaatttaggcccatggagattgcgcaacaatagtacatggagtcgtagtagtggccaaaccgcagaatggaagaatctcagcagctatttgcaacgggcggttattcctctgaaaggcgaactgaccgtaggtgatgattatactgcaggcgattttttcgatagtgtcagctttcgtggtgtgcagctggcgagtgatgacaacatgctgccagacagcctgaaagggtttgcgcctgtggtgcgtggtatcgccaaaagcaatgcccagataacgattaagcaaaatggttacaccatttaccaaacttatgtaagccctggtgcttttgaaattagtgatctctattccacgagcagcagcggtgatttgttagttgaaatcaaagaagcggacggcagcgtcaatagctacagcgtaccgttctccagtgtgccattactccagcgtcaggggcgaatcaaatacgcggtgacactggcgaaatacagaaccaatagtaatgaacagcaggagagcaaatttgcccaggccacgttgcagtggggcggaccgtggggaacgacctggtatggtggtggacaatatgctgaatattaccgtgccgccatgtttggtctgggatttaacctcggcgatttcggagcaattagcttcgatgcgacccaggcgaagagtacgctagcagatcaaagcgaacataaaggtcagagttatcgttttctgtatgccaaaacgctcaaccacttgggcactaactttcaattgatgggctatcgctatagcacgagcggtttctacaccctttccgacaccatgtataaacatatggatggctacgaatttaatgacggtgatgatgaagatacgccgatgtggagccgttattacaatttgttttacaccaaacgtggcaaactgcaggtcaatatctcccagcaattaggcgagtacggtagcttttatttaagtggtagccagcaaacttactggcatacggatcaacaggatcggctattacagtttggctacaacacgcaaattaaagatcttagcctggggatttcctggaactacagtaagtcccgtggtcaacctgatgctgatcaggtgtttgctctaaatttttccctgccgctcaatctgttgctccccagaagtaatgatagctataccaggaaaaaaaattacgcctggatgacctctaacaccagtatcgataacgaagggcacactacacaaaacctgggtttaacggagacattactcgatgacggtaacctgagctacagcgtgcaacagggatataacagcgaggggaaaacggctaatggtagcgccagcatggattacaaaggggcgtttgcggatgcccgagtgggctacaactacagcgataacggcagtcaacaacaactgaactacgctcttagtggcagtttagttgcccatagtcagggcattaccctggggcaaagcctgggggaaactaacgttctgattgcagcaccaggcgcagagaatactcgtgtggcgaacagcaccgggctgaaaactgactggcgcggatataccgttgttccttatgccacttcttatcgggaaaatcgaatcgcacttgatgcggcgagcttaaaacgtaacgtggatcttgaaaatgcagtagtcaacgtggttcccaccaaaggggcgttggttctggcggagttcaatgcccatgcgggtgcaagggtattaatgaaaacaagtaagcagggtataccgctgcgttttggcgcgatagcgacgctggacggcgtacaggctaatagcggcataattgatgatgatggcagcctctatatggcgggtttaccggcgaagggaacaataagcgtgcgctggggcgaagctcccgatcaaatttgtcatatcaattacgagcttaccgaacaacaaattaactctgcgattacgcgaatggatgccatatgcagataatctttggagaaaaatgcgtgagtttactacgactattttttgccgccgtcttaatgttatggtgcgctcaaaccgctgcttatagcgggcagtgtcatactactcaggggaatccgtatattggcgtcaattttggcgttaaaaccctggaggaagaagcaaatacggcaggggtagttaaagacaaattttatcagtggaacgaaagcaatgattattatgtttcctgtgattgcgataaagacaatgtcagaagtggccgatgggcattcgccgcggatagtccgttagtctatttaggcgacaactggtacaaaattaatgactatcttgccgccaaagttttattgcaggttaaaggcagttctcctactgcggttcctttcgaaaacgtgggcacagggggggatacccgatggcatatttgcgaccctggcggtcaacgtttaggtgggcagggggcaagcggtaatagcggtagcttttccctgaaaatattgcagccgttcgttggcagcgtcgtcattcctcctatggcgctggcgcgattatatgaatgctacaacatacccgcaggtgattcctgcacgactacaggtacaccggttttagtgtattacctgtctggtacgatcaatagtcttggcagttgttccgtcaatgccggagagacaattgaagttgatttaggtgatgtcttcgctgccaatttccgtgttgtagggcataaacctcttggggccagaacggcagaacttgcaattccagtcaggtgtaacacgggaaacgcgggattagttaatgtcaacctgagtctgacggcaaccacagaccccagctatccccaggcgattaagacgagtcgtcctggcgtgggcgtggtggtgaccgatagccagaacaacattatttcccctgctggtggaacattaccgctctctattcctgatgatgcagacagtatcgcgcgaatgaatgtctatccagtcagcacgacaggtgtaccaccagaaaccgggcgatttgaagccacggcaacggtgagaataaattttgattaacgcgtgaacgtatgaagaaaaaaacgatatttcagtgcgttatcttgttctttagcattcttaacatccatgtcgggatggctgggcctgaacaagttagtatgcatatttatgggaatgtggtcgatcagggctgtgatgtcgccaccaaaagtgcattacaaaatattcatattggtgattttaatatcagtgattttcaggccgcgaataccgtaagcactgctgctgatttgaatatcgatatcaccggttgtgccgctggtattactggcgcggacgtcctttttagcggcgaggctgacacccttgcgccgacactgctcaaactaactgacacaggcggaagcggtggtatggcaacggggattgccgtgcaaattcttgatgcgcaaagtcagcaagaaatcccgctcaatcaggtccagcctcttacgcccttaaaagccggggataacacactcaaatatcaacttcgttataagtccacaaaggcgggagcaacgggcggtaatgcgacggcggttctctattttgatctggtttaccagtgaaggagtgatgttgaaacggataatctggattctgttcttattgggattaacgtggggctgtgagctatttgcccatgatggcacggtcaacattagcggaagctttcgccgtaatacatgcgtgctggcacaggatagcaagcaaatcaatgtgcagttaggcgatgtcagcctgacacgtttttctcatgggaattatggcccggagaaatctttcatcattaatttgcaggattgcggaacagatgtcagcacggttgacgtcacctttagtggaacccccgacggagtgcagagcgaaatgttgtccattgaaagtggtacggatgcagccagcgggctggcaattgcgattctggatgatgcgaagatattgattccgcttaaccaggcgagtaaagactacagcctacatagcggtaaggtgccattaactttttatgcgcaattgcgacctgtcaatagcgatgtgcagagcggtaaagtgaatgccagcgcgacatttgtacttcattatgactaatacgtggaacagattggcgctcttgattttcgccgttttaagcctgctggtggcgggtgaattgcaggcaggagtggtggtcggcggaacgcgatttatctttccggcagacagagaaagcatatctattttactgactaataccagtcaggaatcctggcttattaacagtaaaatcaaccgcccaacgcgttgggccgggggggaagcgagcacagtgccagcaccattactggccgctccgccacttattctcctgaagcccggtacgacaggcacgttgcgcttgctgagaacggaaagcgacatcttgcctgtggatcgcgaaacgctatttgagttaagcattgccagcgtgccatccggcaaagttgaaaatcagagcgtaaaagtggcgatgcgcagcgtatttaaactgttctggcgacccgaaggtttgccgggcgacccgctggaagcttatcaacaattacgctggacacggaatagccagggtgtacaactcactaacccaacgccttattacattaacctgattcaggtgagtgtaaatggtaaagcgttaagtaatgtgggagttgtgccgcctaaaagccagcgtcagacaagctggtgtcaggcaatcgcaccgtgtcatgtcgcctggcgggcgataaatgattacggcgggttgagtgcaaagaaggagcaaaatctgccctgaaacaggttcggaaaacgtttgcgttttttttgccgcaggtcaattcccttttggtccgaactcgcacataatacgcccccggtttgcacaccgggaatccaggagagttcatgtactaccccttcgttcgtaaagcccttttccagctcgatccagagcgcgctcatgagtttacttttcagcaattacgccgtattacaggaacgccgtttgaagcactggtgcggcagaaagtgcctgcgaaacctgttaactgcatgggcctgacgtttaaaaatccgcttggtctggcagccggtcttgataaagacggggagtgcattgacgcgttaggcgcgatgggatttggaagcatcgagatcggtaccgtcacgccacgtccacagccaggtaatgacaagccgcgtctctttcgtctggtagatgccgaaggtttgatcaaccgtatgggctttaataatcttggcgttgataacctcgtagagaacgtaaaaaaggcccattatgacggcgtcctgggtattaacatcggcaaaaataaagatacgccagtggagcagggcaaagatgactatctgatttgtatggaaaaaatctatgcctatgcgggatatatcgccatcaatattagtagcccgaataccccaggattacgcacgctgcaatatggtgaagcgctggatgatctcttaaccgcgattaaaaataagcaaaatgatttgcaagcgatgcaccataaatatgtgccgatcgcagtgaagatcgcgccggatctttctgaagaagaattgatccaggttgccgatagtttagttcgccataatattgatggcgttattgcaaccaataccacactcgatcgttctcttgttcagggaatgaaaaattgcgatcaaaccggtggcttaagtggtcgtccgcttcagttaaaaagcaccgaaattattcgccgcttgagtctggaattaaacggtcgcttaccgatcatcggtgttggcggcatcgacagcgttatcgctgcgcgtgaaaagattgctgcgggtgccagtctggtgcaaatttattctggttttatttttaaaggtccgccgctgattaaagaaatcgttacccatatctaattatttcttcgaattcctctttataagataatcagggctttattttcagccctggttgttttatattcatcgctgttgcttatttagacattttgtacttttattgttgaggttattaagcgaagcgacaatggattgtgttgctgcggttttatagggtaggggagaggcagatgcgaattaaaccagacgataactggcgttggtattacgatgaagagcacgatcgaatgatgctcgatttagccaatggtatgctatttcgcagtcgttttgcgcgcaagatgttgactccagatgccttttctcccgcaggcttttgcgttgacgacgccgcgctctatttctcttttgaagaaaagtgccgcgattttaatttatctaaagaacaaaaagccgaactggtgctgaatgcactggtagcaattcgctatctcaaaccgcaaatgccgaaaagctggcattttgtttcccatggtgaaatgtgggtgcccatgccgggcgatgcggcctgcgtttggttgagcgatactcacgagcaggtcaatttgctggtcgttgaatctggcgaaaatgccgcactatgcctgctggcacaaccctgcgttgttattgcgggtcgcgcgatgcagttgggcgacgccattaaaatcatgaacgacaggctgaaaccgcaggttaatgttgacagcttcagcctcgaacaggcagtttaacgcgccaacttaagtgcagtcttcggtacacagctacagcaaagaatggtgccatcatcgcccattgcactttttttcagcggcgtgacttcgccttctaaaagctgaacacggcaacttccacaaatgcccgcgcggcaagaataagggatacgaattccctgattttctaattgctccagcaacacctgttggttatttccacgaaatgcctgtccctgccagtcaatatctacatttgcgtccggttgttgcgtgatgttggcggtatcatcagcggcagctgcgccgtaaatttttgccggagccgttgccagaatttccacctcatcgccaacgcgaatcacgccgctattacgggcaattaaattctgaccaaaatcgacatcgccgttatcctgggcagtgcggaaagattgcaatgtttttaatggttcgcctgccggatgtttttgccctttttctgggctgacggtggtgaaaatacagcggctacaaggtttaaccacatcaaacaccacatcaccaatgcgaatcactttccagcgatcttcttcccaggcactcgcgccggaaaccaccagattggggcggaattgctccatttttacactggccggacaacgttgttggagatcacgtaagctggcttcgttagcaagaaggtaaggatagccatcagcaaaactcagaggtacagtgttgtggcgtttcacgcgccgggtcatttgtggccccacccagcgtaattgcacttcgcgggagaaaaatccacttagccatttgttgatcgcgtctggcgcaattcgcgcggtaaaatgtgtgccccaaacttcggttggtgcgtcttgtgtggcgaaatcagcaaaacgaacatatgcgctactgccatctggtgcggtgagatgcaagccatcatgcacaggactaggagtaaaccgtaccatctggggaaactggcgagcggtaataaacgtaccgtcaggttccgtgatcataaagatgcgatcgaaggccagaccactgacatctgccagagcatgtgtaagaccaatgccgcgcatgcttttaacaggatgaataaaaagccggattaatgtcgccacggtgcggtcctcaaatgaaaataagccctcaactttatgacatgacgcgcttattagctataatgcgcaacaattttcttagcgcctgtcccattaggctattttatttgtcagtttggccctgggttatgctcgaaatcctcacgtacttgtgtacgctccggtttctccgcgctgtccatgtccagactgactgcaacaattacgcctactgcggtaggctcttagagtaaaagtgacgatatgaattctctgtttgccagtacggcccgtgggctggaagagctgttaaaaactgaactggaaaacctgggggccgttgaatgccaggtggttcagggtggggtccatttcaagggcgacacacggcttgtttaccagagcctgatgtggagccgcctggccagccgtattatgttgccgctgggcgagtgtaaggtttacagcgatttagacctctatctcggtgttcaggcgatcaactggacagagatgtttaatcctggcgcgaccttcgctgtccacttcagtggtttgaatgacaccatccgcaacagtcagtacggcgcgatgaaagtgaaagacgcgatcgtcgatgctttcacgcggaaaaatctgccgcgtccaaatgttgatcgcgatgcgccggatatccgcgttaacgtctggctgcataaagaaaccgccagtatcgctcttgatctgagtggtgatggtttacatctgcgtggctatcgcgatcgtgctggtattgcgccgatcaaagaaaccctggcagccgctattgtgatgcgatccggctggcagccaggaacaccgctgctcgatccgatgtgtggttccggtacgttgctgattgaagcagcgatgctggcgaccgatcgcgcaccaggcttgcaccgtgggcgttggggctttagcggctgggcgcagcatgatgaagctatctggcaggaagtgaaagcggaagcgcaaactcgcgcccgtaaaggcctggctgagtatagctctcatttttacggtagcgacagcgacgcacgggtgattcaacgtgcacgcactaacgcccgtcttgcggggattggtgaactgatcacctttgaggtgaaagatgtcgcgcaactgaccaatccgctgccgaaagggccgtacggcacagtgttgagcaacccgccatacggggaacgtctggacagcgaaccggcgctgattgcgctgcatagcctgctgggtcggatcatgaaaaaccagtttggtggctggaatctctctttgtttagtgccagcccggatctgctaagctgcttgcagctgcgtgcagacaaacagtacaaggcgaaaaacggcccgctggactgcgtacagaaaaattaccacgttgccgaaagcactccagacagcaaaccggcgatggtagcggaagactacaccaaccgcctgcgtaagaacctcaaaaaattcgagaagtgggctcgccaggaagggattgaatgttaccgcctgtatgacgccgatctgccagaatataacgttgccgttgaccgttatgccgactgggtggtggtgcaggagtatgcgccgccaaaaactattgatgctcacaaagcgcgtcagcgtctgttcgatattatcgctgcaaccattagcgtactggggattgcgccaaacaaactggtgctgaaaacccgtgaacgccagaagggcaaaaaccaataccagaaactgggcgagaagggcgagtttcttgaagttaccgaatataacgctcacttgtgggtgaacctgacggattatctcgatactggtctgttcctcgatcaccgcatcgcccgtcgtatgctcggtcagatgagcaaaggcaaagatttcctcaacctgttctcttataccggcagcgccaccgtgcatgcgggattaggcggtgcacgcagcaccaccaccgtggatatgagccgtacttatctggaatgggcagaacgcaacctgcgtctgaatggcctgaccgggcgtgcgcatcgcctgattcaggccgattgcctggcgtggctgcgtgaggcaaatgaacagttcgatctgatctttatcgatccgccaaccttctctaacagtaaacgaatggaagatgcgtttgatgttcagcgcgatcatctggcgctgatgaaagatttgaaacgtctgctgcgtgcaggtgggacgatcatgttcagcaacaacaaacgtggcttccgtatggatctcgacggcctggcaaaactgggactgaaagcacaagaaattacgcaaaaaacgctctcccaggatttcgcccgtaaccgccagatccacaactgctggctgattaccgcagcctgaaaggaatagtaatgagtttaatcagtatgcatggcgcatggctgagcttcagcgacgcgccgcttctcgataacgcagaactgcatatcgaagataacgaacgtgtttgtctggtgggccgcaacggcgcaggcaaaagcacgttaatgaaaatcctcaaccgtgaacaagggctggatgacggtcgcattatttacgagcaagatttgattgtagcgcgtctgcaacaggatccgccgcgtaacgttgagggtagcgtttatgatttcgttgccgaaggcattgaagaacaagcggaatatctgaaacgctatcacgatattagccgcctggtgatgaacgacccgagcgagaaaaatctcaacgaactggcgaaggttcaggaacagctggatcaccacaacctgtggcagctggaaaaccgcatcaacgaagtgctggcgcaactggggttagatcctaacgttgcgctgagcagcctttccggcggctggttgcgtaaagcggcattaggacgcgcgctggtgagtaatccgcgcgtgctgttgcttgatgaaccgacaaaccacctggatattgaaaccatcgactggctggaagggtttttgaaaactttcaacgggacgattattttcatctcccacgaccgtagctttatccgcaatatggcgacgcgcattgttgatctcgatcgcggcaagctggtgacctatccagggaattacgaccagtacctgctggaaaaagaagaagccctgcgcgtggaagaattacaaaatgccgagttcgatcgcaaactggcgcaggaagaggtgtggatccgccaggggatcaaagcacgccgtacccgtaatgaaggccgcgtacgcgccctgaaagcgatgcgtcgcgaacgtggtgaacgtcgcgaagtgatgggtaccgcaaagatgcaggtggaagaggccagccgctccggtaaaatcgttttcgaaatggaagacgtttgctaccaggttaacggtaagcaactggtgaaagatttttctgcccaggttctacgtggcgacaaaattgccctgattggtccgaatgggtgcggcaaaaccacgctgctaaaactgatgctcggtcagcttcaagtggacagcgggcgtattcacgttggcaccaaactggaagtggcttatttcgatcagcaccgcgcggaactggatcccgataaaacggtgatggataaccttgccgaaggtaagcaagaggtgatggttaacggcaagccacgccacgtattgggctatttgcaggactttctgttccatccgaaacgggcgatgacgccggtacgtgcgctttctggcggtgagcggaaccgcttgctgctggcgcgtttgttcctcaaaccaagcaacttattgattcttgacgaaccgaccaacgatcttgatgtcgaaacgctggaactgctggaagaactgatcgacagctatcagggcacggtattgctggttagccacgatcgtcagtttgtcgataacaccgttacagaatgttggatcttcgaaggcggcggtaaaattggtcgttatgtcggcggttatcatgatgcccgtggtcagcaagagcagtatgtggcgctcaaacagcctgcggtgaaaaaaaccgaagaagccgccgcggcaaaagcagaaactgtaaaacgcagcagtagcaaactaagctataaattgcagcgcgaactggagcagctaccgcaattgctcgaagatctggaggcgaagctggaagccctacagacgcaagtggcggatgcttccttcttcagtcagccgcatgagcagacgcaaaaagtgcttgctgatatggctgctgcagagcaggagctggagcaagcctttgaacgctgggagtatcttgaagcgttaaaaaatggtggctgatcgcaaaatagtcgatttaaacagagacagctgacaacggtaaaattgcctgatgaactgggtttatcaggcatgaaaaccaacactttgttagtcatctgtaaaatagcgcatcattaaggagtaccaatgtgcgaacatcatcatgccgcgaagcacatcctgtgcagccagtgtgacatgctggtggcgttaccgcgccttgagcatggtcagaaagcggcatgtccccggtgtggcacaacgttaaccgtggcgtgggatgcccctcggcagcgtcccaccgcctatgcgttggctgcactgttcatgctgttgctgtccaacttgtttccttttgtgaatatgaacgttgcaggagttaccagtgaaattacattactggaaattcccggcgtgcttttttctgaggactacgccagcctcggcacctttttcctgttgtttgtgcaactggttcccgcgttttgtctgataaccattctgttactggtgaatcgcgcggaattaccggtccgtttaaaagagcaactggcacgggtgctttttcaactcaaaacctggggaatggcggagattttcctcgcgggtgtgctggtcagtttcgttaaactgatggcttacggcagcattggggtaggcagcagctttctcccctggtgtttattttgtgtcctgcaactgcgcgcttttcagtgcgttgatcgtcgctggttatgggacgacatcgccccgatgccagaactgcgccagccgctaaaaccaggcgtcacggggatacgtcaggggctgcgtagctgctcctgttgtacggcaatccttcctgctgatgaacccgtgtgcccgcgttgtagtaccaaagggtacgttcggcgtagaaacagcctgcagtggacactcgcgctgcttgtaacgtccatcatgctgtatcttccggctaatattttgcccatcatggtgacggatttattaggcagcaagatgccgagcacgattctcgctggggtcattctgttatggagcgaaggctcttatcccgtcgctgcggtgatctttctggccagtattatggtgccaacgttaaagatgatcgccatcgcgtggctgtgttgggatgccaaagggcatggcaagcgcgacagtgaaagaatgcatttgatttatgaagttgttgagtttgtaggccgctggagcatgattgacgttttcgttatcgcggtgctcagcgcgctggtgcgtatgggaggtttaatgagtatttatccggcaatgggtgcattaatgtttgctttagtcgtcataatgacaatgttttctgctatgacgtttgacccgcgtttgagctgggatcgtcaacctgaaagtgagcatgaggagtcctgacagtatggaatctaataatggggaagccaaaatccagaaagtgaagaactggtctcccgtgtggatatttcctatcgtcacggcgctcattggggcctgggttcttttttatcattacagccatcagggaccggaagtgaccctgatcaccgcgaatgcggaaggaattgaaggtggcaaaaccaccattaaaagccgtagcgttgacgtcggcgtggttgaaagcgccacactggctgatgatttgacgcacgttgaaatcaaagcgcggctgaattccggtatggaaaaattgctgcataaagacaccgtcttttgggtggtgaaaccgcagattggtcgcgaagggattagcggcctgggaacgctgctgtctggagtttatatcgaactgcagccaggcgcgaaaggcagcaaaatggataaatacgatttgctggacagcccaccgttggccccgcctgatgcgaaaggtatccgtgtgattctcgatagcaaaaaagccgggcagctcagcccaggagatccggtgctgttccgtggctatcgggtaggtagcgttgaaaccagcaccttcgatacacaaaaacgcaatatcagctatcaactgttcatcaatgcaccttatgaccgactggtgaccaacaatgttcgcttctggaaagatagtggcattgcggttgatctgacgagtgcagggatgcgtgtggagatgggcagtttgacaacgctgctgagtggcggtgtcagctttgatgtgccggaaggtctggatttagggcagccagtggcaccgaaaacagctttcgttttgtatgatgatcagaagagcattcaggatagcttgtacaccgatcacattgattatctgatgttctttaaagatagcgtacgcggtctgcaaccgggagctccggtagagttccggggtattcgcctgggtaccgtaagcaaagtgccattctttgcgccgaatatgcgtcagacatttaacgatgattaccgtattccggtactgattcgtatcgagccagagcggctgaaaatgcagcttggcgaaaatgcggatgttgttgagcaccttggcgaattgttgaaacgtggtttacgcggaagcctgaaaaccggaaacctggtcactggtgcactgtatgttgatctcgatttctatccaaatacgcctgcaataaccggtattcgtgaatttaatggttatcagattatcccgaccgttagcggcggcctggcgcaaatccagcaacgactgatggaagcgttggataagatcaacaaactgccattgaatccgatgattgaacaggcaaccagtacgctttctgaaagtcagcgcacaatgaaaaacctgcaaacgacgctggatagcatgaacaagatcctcgctagccagagcatgcagcagttgccgacggatatgcagagtacgttgcgtgaattgaatcgcagcatgcagggcttccagcctggctccgcagcctacaacaagatggtggcggatatgcagcgccttgatcaggtgttgcgagaactgcaaccggtgctgaaaacgttcaatgagaagagtaacgcgctggtatttgaagcgaaggacaaaaaagatccagagccgaagagggcgaaacaatgaaaaagtggctagtgacgattgcagcactgtggctggccggatgcagctccggcgaaattaataaaaactattaccagttacctgtggtgcagagcggtacacaaagtaccgccagccagggcaatcgtctgttatgggtagagcaggtcactgttcctgactatctggcggggaatggtgtggtttatcaaaccagtgatgtgaagtatgtgattgccaacaacaacttgtgggccagcccgttggatcaacagttgcgcaacaccctggttgccaacctgagtacgcaactgcccggctgggtggttgcctcccagcctctgggaagcgcccaggacacgctcaatgttaccgtaacggagtttaacggtcgctatgatggcaaggtcattgtcagtggtgagtggctgttgaaccaccagggacaactgatcaaacgtccgttccgtctggaaggagtgcaaactcaggatggttacgatgagatggttaaagtgctggccggtgtctggagtcaggaagccgcttctattgcacaagagataaagcgtctaccttaattataaagatttgtaaatataaccgtctccggtatgttgcctgaggcggtttttttgtctctaacgtgcggaaaaatttgttcctcttcacattttttgtacaaccgacatgcccgtgtagctcacaaatatgacagtggcgtgaattttgcgcattgacggcagttatgattcgcggtattgcttaactgtgattgcacatttagtaatcactgttttcttttccaccagaaaccagtatgagggaaacgaggcatgaagagacaaaaacgagatcgcctggaacgggcacatcaacgtggttatcaggccggcatcgccggacgcagtaaagaaatgtgtccctatcagacgctgaatcaaaggagtcaatggctgggaggctggcgagaagccatggcggacagggtagtaatggcctgattctgtctctttaaaaagaaacctccgcattgcggaggtttcgccttttgatactctgtctgattataatcagaaggcagacgtatcctggaacagaccgactttcaggtcgctggcggtatagatcagacgaccatcaaccagcacttcgccatccgccaggcccataatcagacgacggttaacaatgcgtttaaagtgaatacggtaggtcacttttttcgctgtcggcagtacctgaccagtgaatttcacttcgccaacgcccagcgcgcggcctttaccttcgccgcccagccagccgaggtagaaccctaccagctgccacattgcgtccaggcccaggcatcccggcataaccggatcgccaataaagtggcatccgaagaaccacagatccggattgatatccagttctgcttcaacataccctttgtcgaagttaccacccgtttcggtcattttgaccacacggtccatcatcagcatgttcggtgctggcaattgcgggcctttagcgccaaacagttcaccgcgaccagaggcaagaaggtcttcttttgtataggattcgcgtttatctaccatgttctctgtaagccttattttattgaagcacgcaggatagctaacacgtgtacgctgaacaagtccgatcagttcggaataaaccagttcagccaacgtaatggccatggaaaacggtgacgtccttcctgttggcttgcttgcgcgatacgttcctggatggtttgcatcagcgtcgtttggccttcgccatcccacaccagatttaataataacggcagtgcgtcagtcacatcgtctactgcccagatggtgaatttgccttcttctaccgctttcaccagttcactgtgaagacttaaatggcgaacgttagctgtggggataatgacaccttgtttcccggttaactcacgttgctggcaaatagcaaagaagccttcgattttctcatttaaaccaccgaccggctgggcgcgaccgaactgatcgacactacctgtgatagcgatactctgattcaccggcacatcggcgagggcgcttatcagggcgcagagttcagccatgctggcactatctccatcaacttcactgtaactctgctcaaatgtcaggcttgcactgaaggggatctgttgctcaagctgtagttcgctcatcaggaacgcttgcatgatcatcatccctttcgcatggatattgccgccaagctccgctttgcgttcgatgtcggtgaattcaccatcgccaatatgcacaacgcagctaatgcgagaaggttcgccaaaagcgcgtggatgacccggaaattcaatgacgctaagggcgttaatttgcccgatgcgttcgccttcggtttcaatcaggatttgctcctgaaggatctcatcctgcatacgttcagcgaggaaaccttcgcgccattcacgctgctgcagcattaagtttagctgctcgccggagaaggtgtcgccatcacacagggaggcgacctctttacactggcggaggatccactgcgggctaagcggaagtgtttcttgttcaccggtgtagcgtgctgcttcgcggataagtatcggccaggcatccgctcccggtgcaggtaagtgattatgtctggcggtaaatgtcacccagcgacaccactgggttacactctccgcatcgacaatctgcagagtatcttcaaattcgctataaatagcctgctcactaagctctggctccatctcctggaaatcagccaaactttcgcgttcgcctaccagaatgactttcagcttcaatggcatgctaggcacagagacggggagagggcggctctcatcaaacgcaacccagtcaaaacgctcgcggttaacgatatttttcagccgcatccacagcagaggttgcgccagcagtgtacgcaaagagataatgagaataccgccatttgcctgatgcaccagaccaggctgcagggtaatgtcgccattaaactggcgcaggcagccaaagagttgctccgcttctacccagtcggcagcgacaacttgcgttaaagtcgcaaaattatcatctgcactcactgcgtgacgtaagcggatggagtggccggaaacctcatagtgaccgcccaccagttggcctgcatcgctttgtagcgtacgcgcggcattggcaataagattcagatactcagactcttccggggccttcgccagcataaaagaggaggatgctcgcgtatgcagcaactgctccagcgcaaattgcagccgcggttgagtatcactgaataaaggatcgttttcgtcaatcaaatgtggctgagcaaatatttcctgatagctatcggtatcaggaaccaggtcacgccatgcaagtttcgtaatggtcaaagttgatgttttttagtctgttgtcaaagccgcgattataccgtaaccggcactacagcacacgtagaaagcaccgacaatactcctggcatgggcgttaaagctcacaggatggagattcttttcttcactggcctaaaaagctgatattctgtaaagagttacacggtaacattgagatcgctatgaaatatcaacaacttgaaaatcttgaaagcggttggaaatggaagtatctggttaagaagcatcgcgaaggggagttaatcacccgttacatagaagccagtgccgcccaggaagccgtcgatgtgttgctcagcctggaaaatgaacccgtgctggtaaatggctggattgacaagcatatgaatccggaactggtcaatcgcatgaagcaaaccattcgggcaagacgaaagcgccattttaatgcggaacaccagcatacgcgcaaaaaaaagcatcgatctggaatttattgtctggcaacgtctggctggtcttgcgcagcgtcgcggtaaaacgctttctgaaacgattgttcagctgattgaagatgcggaaaacaaagagaaatacgcgaataaaatgtcttctctgaagcaggatctgcaggcattgctgggtaaggaataactgacgaaagtcagttcaatttactaaaggcaaaaaaaaccccgcagcagcggggtttttctaccagacgagaacttaagcctgcggctgagttacaacgtctttgatacctttaacttcgatctctacgcgacgatccggagccaggcagtcgatcagtgcagcacgctgtttcacgttgtcacaggtgttgccagtaaccgggttggattcgcccataccacgtgcggagatcttgtctgccgggatacctttggagatcaggtaatcaacaacagactgagcacggcgctcggacagaccctggttgtaagcgtcagaaccgatgcggtcggtgtaacccagaacaactacggaaccgtctttcggatccaggttgctcagctggctgtacagctgatccagagcagcctgaccttccggtttcagggttgctttgttgaagttgaacagaacgtcagacttcagagtgaagtgcttggtctgtacttccggtgccggagctggagccggagcaactactggagctgcttcgccctgaccgaaacggtaggaaacacccaggctcagcatgccgttgtccggacgagtgccgatggtgtgtgcgtcaccgatgttgttggtccactggtattccagacgggtagcgatttcaggagtgatcgcgtactcaacaccgccagcgaagaccggagaaacgccggtgtcgtggtttttaccataaacgttggatttagtgtctgcacgccataccatgccacccagacgagtgtagatgtccaggtcgtcagtgattgggtaacccagtttagcggtcagttgaacgccctgagctttgtatgcaccgttttcaacgctgcctttgtacggcatacgacctaaccagtcgtaacccatttcaaagccaacatacgggttaacctggtaaccaccaaaagcaccagcgcccagttggttttcatgggtcgggccattgttgttgatgaaaccagtgtcatggtactgggaccagcccagtttagcaccagtgtaccaggtgttatctttcggagcggcctgcgctacggtagcgaaaccagccagtgccactgcaatcgcgatagctgtctttttcattttttgcgcctcgttatcatccaaaatacgccatgaatatctccaacgagataacacggttaaatccttcaccgggggatctgctcaatattaactctaccgatatcttcggcttatgccgagcacccctggcgatgtaaagtctacaacgtagttgaaaacttacaagtgtgaactccgtcaggcatatgaaaaaaaagtcttgtataaggtatgtttaatcttttttgtcagcgacaatttacagaagagaatcgcggaaaccgcttcagacaagcctccgcaaggaaaattagtcacgactgaaagcattggctgggcgacaaaaaaagttccaggattaatcctaaatttacttaatgatacaaattagagtgaatttttagcccggaaagttgtctcgtggcgtgagaggatgcgcttaccggacgcataataaaccccatagcgttaccttcatttgccgcatcaacaagttcagcatgctcttcttcagtcaaatcatctgccaaccaaccgatcaccacactgtaattgcccgtgcgtaaagcgcgaaccatactctccacagtgtggcaaggggagagctggctaatctgcattactttcgttaagggtagcccagatgcctgaacccattcccgactcagtttttgttgcggtgttaaccagagttgccagcggctttgctgaccgagttgctgtaacaatggcaacagtagaagttgcgtcatcatgggctgatcttcgcgatagacaacttcactgataagcccggctgtagtgttttccgtagagacacgcgcaattttacttgctgcggaactgaagctgctagaacgatgtgcatagccactagtgtacataatcaatccagcccctgtgagttactgtatggatgtacagtacatccagtgacaacaaagatcaaccctattttcggaaagagcctcgcaaattttgtcgttggtgacgggaaaacataaattaatcttgccccttaagaataagttgcctattttcgtagttaacggatccgttaatgtgaatcattcttttatgttatgattttaaaaggaattttatgaaaagcctctcctataagcggatctataaaagtcaagaatacctggcaacgttgggcacaattgaataccgaagtttgtttggcagttacagcctgaccgttgacgacacggtgtttgcgatggtttctgatggtgagttgtatcttcgggcttgtgagcaaagtgcacagtactgtgtaaaacatccgcctgtctggctgacatataaaaagtgtggccgatccgttaccctcaattactatcgggttgatgaaagtctatggcgaaatcaactgaagctggtgcgtctgagcaaatattctctcgatgcagcgctgaaagagaaaagcacgcgcaatacccgggaaagactgaaagatttgcccaatatgtcttttcatctggaagcgattctcggggaggtggggattaaggatgtacgggcgttacgtatacttggggcaaaaatgtgttggttgcgactgcggcagcaaaacagtctggtgacagaaaagattctgtttatgcttgaaggtgccattatcggcattcatgaagctgcgctcccggtggcacgccgccaggagcttgcagaatgggctgactctcttacgccgaaacaggagtttcctgcggaacttgagtaattacgcgctaacaggagtttcctgcggaacttgagtaatctggcgttgcagacgaccaatctcaggcagtaatgcaatcaataatccaacttgttgtacgaccagaggttctttgctgtctgcccgtggttcaagttgctgcatccgctgtttcaggctagctaatgcctcattgacgcgttcttcatcagcaggttgatgatgtaacgcgtcatcaacatagcaaactgcgtcatcaagaaacgccagaatttcaggattagttaactgctcccggtgagcaccgagggcactgatatagctggtaaacgtatggttaaggcacagcaaccgaaacgcggcttcgcgaatttgcggggtaacgttcggctcgctggacatattacttaccacgctcgccagctcagcatcacggttgtgtgcatcgcggcgggcaatacgatacgccagacggttatcacgcccctgatggtattgctccagtatggcatcgagataccgacagttggcctctgtggcacgttcgagcatgcgcggcagattgcgaaactgccagtcaggccagatgtagctcactgccgcccacgcaatggcacaaccaatcagcgtatcgattacgcgaggtaacgctacttcaaaaccttcacccagtaagttaaaacacagtagcaccaaaagtgtgatgaacatcgttgcatgagcgtattgcacgttacggaaggcaaaaaagagcacgccggtaataaccagcagcaccagctgcccttccagacttggcacaaaccacagcacaggaatgccaatggcgatacctaccagcgtaccaataatccttaacttcaggcggtggcgcgtggcgttatagtttggctggcagacaaacaaacttgtcagcaagatccaatacccgtgatgcattccggttatctgaatgatggcgtagccgaagcacaacaccaggctcattcttaccgcatgacggaagagggcggattccggcgtgaagtgacggctaagacgcagccagatatcactcaacccgtgcgggctgtcatcagcgagctcattttcgtcattattatggggtagtgcctgggcctgttcactttcaattgttgccagttgggcatcaatggcgcgtaaattgttcagcaaaaatcccagtgttttgagtaaatcggcgggtgcgccgttatcgcgcatccgctccagcgcagcatcaatatgcgtaaaagcgcgctcaaaatgcggatcatgttgataaggctgacgcaacaaaatacagcgactcagttgctggcacgcctggccctgcatgctcatcagccgctgaaaacggaacagcacgtcgctgtggcgaaaatgttcacgcaatgtttgatactgaatatgagaagagctggcacgctcgtgaatatcctgtgcgacaaagtaataatgcagcgtgcgacgcgttccccgttgaccacgatcgccacgtaagcgggtcagcaggctgagtttcgtctgattcaatgtcgccatcagcagaccgttggcgagagccaaatcgtacagcggtgcctggctttgatcttcaatatcaggatcaaacatgcggctcttgagctcaagataacgcgccagttgttcatagcaacgcgccaggttgtcctgcagcgggcggaccgggaacagcagatgaccaataagtgtcaggacgttgtaccagacggcaccggccagcagatacatcggctgctgataccagtgctcatacagacttgttcccaacatagtgtaaatggcgatcagcaatgcaccgaaggcaattgttgcatagcgttgacccagaccgccgagcaaaatgaagccgctggtagagagcgttaagccaatcgcaaatagccagggccagggaaacagcaattctacactggcgctggcgataaaaaagcagaacagcgtaatgatgaggttacgcaaacgtcccgccagtcggtcatcgagatcggtcagcgccgctgccaccatccccagcgttagcggaatcgtcagttttacatcacccagccaccacggaaacgctgtggttccacaaagcgcaataaaaatacgcgcgtaatacagccaggcgctgttccaggtatagcgtttgagcaaaggacttagcataaaggccatattagtggattattcaaaacgacgacgtgcattggcttcacgcgcagcttgcgctgtttctacgcttaccacgcgacgaccaaccggccatagtgcaatagcggcaattttaaagttcgcaatgccgacaggaatgccaatgatactaatacattgtgcgatgcccgttgcaatgtgcatcaggcataaccaccagccaaagaaaatcagccagaaaatattcaataccgtaccgccagtattcagcagcacatttttgccagccgggttcagttcatcgacatgaatagcttcattgccataaggcaccagagacagtttagtgatctcccagcaggatcgtgtcagcggtaaggtaaaaatcagcacaatactgaccagagtcgccaacagccagcccagagtggtggcaaatccgccaagcacaaagttcagaatgttcaaaacggtacgcataaaacctcgctttactgtggttttcagtaatgggcggcaattgtaacgtttttttgggctggagcacgttttctctgacggttacactgataagaaataatttcgtgtggatctacagagtcatggaactgaaagcgacaacgcttggaaaacgtctggcacagcacccttacgatcgggcggtgatcctcaatgccgggattaaagtctccggcgatcgccacgaataccttattcctttcaatcaattactggcgattcactgtaagcgcggtctggtatggggcgagctggaatttgtactgccggacgaaaaagtggtgcgtctgcacggcaccgaatggggcgagacgcagcgtttttaccatcatcttgatgctcactggcggcggtggagtggcgagatgagcgaaattgcgtctggtgttttacgccagcaactggatttgattgccacgcgcactggggaaaataaatggctgacgcgtgagcaaacctctggcgtgcagcaacaaatccgccaggctttgagcgcgttgccgttgccggttaaccgactggaagaattcgataactgccgtgaggcgtggcgtaaatgtcaggcctggttgaaagatattgaaagcgctcggttgcagcataaccaggcgtataccgaagccatgcttaccgagtatgcggattttttccgccaggtcgagtctagtccgctgaatccggcgcaggcccgggcagtcgttaatggcgagcattctctgttagtgctggcaggtgcaggaagcggaaaaacgagcgtgctggtggcccgtgcaggctggttgctggcgcgtggtgaagcgtcccctgagcaaattttattgctggcgtttggtcgcaaagccgctgaagagatggacgagcggattcgcgaacggctacataccgaagacattaccgcacgcacgtttcatgcgctggcgctgcatattattcagcagggcagcaaaaaagttccgatagtcagcaaactggaaaatgataccgctgcccgtcatgaactctttattgctgagtggcgcaagcaatgcagcgaaaagaaagcgcaggcgaagggctggcggcaatggctgacggaagaaatgcagtggagtgtgccagaaggtaacttctgggatgatgaaaaattacagcgtcgccttgcctctcgcctcgatcgctgggtaagtctgatgcggatgcacggtggtgcacaggcagaaatgattgccagtgcacccgaagagattcgcgatctgttcagtaaacgtatcaagttgatggccccgttattaaaagcctggaaaggtgcgctgaaggcagaaaacgctgtcgattttagcggccttattcatcaggcgattgtgattctggagaaaggtcgctttatcagcccgtggaagcatattctggttgatgaatttcaggatatcagcccgcagcgggcagcgttgttagcggcattacgcaagcaaaacagtcagacgacgttgttcgctgttggtgatgactggcaggcgatttaccgattcagcggtgcgcaaatgagcctcaccaccgctttccatgaaaactttggtgaaggcgaacgctgtgatttagacacgacttaccgttttaacagtcgtatcggtgaggtggcaaaccggtttattcagcagaacccaggccagctgaaaaagccgctaaacagcttaaccaatggagacaaaaaagccgtcacgttattggatgagagtcaacttgacgctttgctggataagctctctggttatgccaaaccggaagagcgcattctgatcctggcgcgttaccatcacatgaggcctgccagcctggaaaaagcggcaacacgctggccgaagttgcaaatcgactttatgaccattcatgccagcaaagggcaacaggcggattacgtcatcatcgttggcttgcaggagggaagtgatggttttccggctgcggcgcgggagagcattatggaagaggcgctactgccaccggttgaggatttcccggacgctgaagaacggcggttaatgtacgtggcgctgacccgggcacgccatcgggtatgggcactgtttaacaaagagaatccctctccctttgtggaaatactgaaaaatctggatgtgccggtggcgagaaaaccgtaagaaacaggtggcgtttgccacctgtgcaatattacttcagacggtccgcgagataacgctgataatcggggatcagaatatcgaccgcgtcgttgaaatgcgggctctggattatgaagtctgccgttgccacgttggtggcgaccggaatgttccataccgtcgccagacgcagcaaggctttcacgtcaggatcgtgcggcacggcatttagtggatcccagaagaaaatcaatacatcaattttcccttcactgatcaatgcgccaacctgctggtcaccccccattgggccactcaacatcgcgttgacgttcatgccggtcgcgcgggaaattaagttaccggtagtgcctgttgcatacagtacgtgttgttccagtaacggttgatgccgttccacccagctcatcagcatttgtttgcagtgatcgtgtgccaccagcgcaatatgtttccgcgcaggtaaagtgcgagtcgtcagttccataatgtacatccgtagttaactttcctacagattactgtaagcacttatcgctgcaagataaagaccgaaaaagcctgcgcacaggcacaaaaatctcaggaagatggttgtttttccgcccactgcaggaaagtatttcgcgtttgtgggtcagccagtttaaaccaatacttcagccgttgttctgtgagcacctgagactgcggtggaatagcatccagctcggaaacaccgctaagcagcgtactgtcatctgccatcatcgtggcaaattgcggtagactagcgcgtttcgcggatttgttatagcgttcaacctcgacctcataatcaatcgtttttgccgtactggtaatggcgagaatatccagctttaccggaatcggcgtcgcatcgccatccaacaattcaaggcgcggcgcggcatcaaaatggttagcttcccgctcattctccaggcgaggcaggcgaaaattgacctggttgatgagctgggtattaaaactgaccaccagcggtggggagatatacagccgttcttcactattggaaagatgaatcgtcttctcaacgcgaaacactaactgatgcggtccattatccagttcaatgctgtccgcaccgcgcagcagagagctggaaaccttcttgccgtcgagtaccagaagatcgacatcggtactaagccgcagcgtggtggcaaaaacggataccggcaaacataatgcaatcaaggtggtcacgatgccggttttcataggtagctcctgtcaaaagaccgcccgaataataatgtgtcaaaatttttctttaatcatacttactaacatatagacatatttcccgcttttgctctcattcattcgtattagctgcatggttggcatgtcggctttgtcgtacactttgttaaacagtctggaggaaataatgaaagaaaccgatattgcaggcattttaacgtccactcacaccattgcgctggtgggggcaagcgacaaacccgatcgtcccagctatcgcgtgatgaaatatctactcgaccaggggtatcacgtcattccggttagcccaaaagttgccggcaaaacgctgctgggccagaaggggtatggcacgctggcagacgttccggaaaaagtcgatatggtcgatgttttccgtaatagtgaagcggcgtggggcgtggcacaggaagctattgccattggcgcgaaaactctctggatgcaactgggggtgattaatgagcaagcggcagtactggcacgggatgccgggttaaatgtggtgatggatcgctgcccggctattgagatccctcgcctgggcctggccaaataaaaaatccccggaaggcaaaaaccttccggggatttgttcagggattagttacgcagacgcggggcctggagttgtttgcggatggtctgcgccagctcatccatggatggctgttcaggatgttcatcctgcaattcgctacttagctgggcttcagccaggtaggtatgaaccggtaggccgttatcgtcctccatcactacgtgataccacggagcggcgcgaagctcgtcattcaccgccagctcatcagggctcggttcagagaggctataaaccgggtcgatatccacgaccactccgagataacctaacagggaatggcggacctgctggccgataccgaatttgctggcaatcatagtcacctcccgggaaatctttacctttgatataagggtaaaattccacatttcaagttacatgacgcgacaggcaaaccctttcagatatagcccttccggataggtagcgatcaccggatgatcggctgcctgacggaactgctctataaattgtacatcacgaccggcatcaattgcggcatccgcgatgattttctgaaataaatcgctggtcatcagaccggaacaggagaaagtcaggagaataccgccttcattcagcagctgaatcgccagcatgttgatgtctttataaccacgacacgcgcccatcaactggcttttattctcaacaaacttcggcgggtccatcacgataacgtcaaatttttcaccgcgatcgcgataagtacgcagcaatttaaagacatcatcacggacaaactcagccttgctcagatccagtttgttcagctcaacgttctgccgtgcaatatccagcgcttcctgggaggtatcaacgctgacaacctggctgcaaccgcccatcagtgcgcttacggcgaaaccaccggtataggagaaacagttcagcacacgtttattttcaacgtagcggcgggtagccaggcggctatcacgctggtccaggtagtagcccgttttgtgtccgtgctgaatatccaccagcagtttcattccgtgttcttcaatcggcagcagggcaggtggcaactcgccggtgacggggccctgggtcagctccattccttcttttttacgtaccgcgacgtcgctgcgatcgtaaatgctacattccgggtacagcgtttgcagggcactaattaatgccgcgcgctgatattctgccccagcactcagcagttgcagcaccagaaaattaccgaaacgatcgatagtaatacccggcaggccatcagattctccggcgattaaacgatagctgtcgaggccatctttttgcgccagccagtcacgccatttttgtgcttgttgcaaacggcgggaaaaaaaagcaatgtcgatagactcagacgggtcaaacgtccagacgcgcgcccggatttggctagctgggctataagcgccgcgtgctaaccattttccctgatgatcaacaatatcgatggtttcaccgaggctggctttaccttccatgcgggcaacggccccggaaaagacccacggatggcgacgaagtaatgatttttcgcgccctttggctaacactaaacgtacactcataatttacttttctgtcgatgcaaagaaatgggcgtcattgtccggagttttccatggatttgcaacgcgtccattaaggataaggagagcagcaatgagcaaagtctgcataattgcctgggtttacgggcgagttcagggcgtaggatttcgctacaccacacagtacgaagcgaaaagactgggtttaaccgggtacgccaaaaatcttgacgatggcagcgtggaagtggttgcttgcggtgaagaagggcaggtggaaaaattaatgcagtggttaaagagtggcggcccgcgttctgcgcgtgtagaacgggtgctcagcgagccgcatcatcccagcggggaattaaccgattttcgtatccgttaaatacattttaccggttttggcaggccagcaattttggtggcttgcttagccggacctttcggaaacagtcggtataaatagcggctgttacctttttcttcgccaaatttattcgccatcgcttttaccagcatacgaatcgccggagaagtattgaattccagatagaaatcacgcacaaaacgcaccacttcccagtgttccggactcaggctaatcccttcgttctctgcaatcaccacagccagcggctcactccactggctgctttctttgagatagccttcggtatccgtttctatctctttaccttcgaagatcagcataattattactaccttaatcagactggcggcagtgtaacaaaaaacaaagccccgcataaagcgaggctatgaaagtgttagcgggtgagattaatcgcggctagcgaagcccagaatgctcagcaggctgacgaagatgttgtacaggctaacatacaggctaaccgtggcacgaatatagttcgtctcaccgccatgaatgatgttgctggtttcaaacaagatagcgccagaggagatcagaatgaagaccgcgctgatcgccagatgcagagcaggcagctgcaggaagatattcgcaaccataccaatcagcaccaccacaatacccgccatcagcataccgccgaggaagctcatatctttgcgggtggtcagcacatatgcagagcagcagaagaacactaacgccgttccgcccagtgccatagcgattacgtcacccattccggcagacagataggtgttcagaataggtccgaggatataacccagaaaaccggtaaaggcgaatgcggagataatcccggtcggcttattcgccgttttataggtcaggaacatcaaaccatacatacccaccagcgtcagaatcagacccggagatggcagcatcagcaccgtactggcagttgcggtaatcgcgctaaaggccagcgtcaggctcagcagaaaataggtattacgcagcaccttatgggtgctaagcagacttgtacggtcatgactagaactaacaatacgatccattgagtcactctctatgacagatgtaattaattaagcagcataatgataatgcgtaagggcacccagaagttttacccatctttacgcatttgatctggaacaggtttaacagcggattatcaggtcattaagcaaatataacgccctgagaatttcgacaggcaaaagaaaaaggggttagcatttagctaaccccttatcttattggaatgacgcgcactataaacatcccgatgcggcgtgtaaacccctaatttgtttgtttgcctgaaaaacagccaaaagtgcattgatagcgtgaaataacagcagattgatcatttcatcaccatgaattccttctcttttactcgtttagcaaccggctaaacatccccaccgcccggccaaaagaaaaataggtccatttttatcgctaaaagataaatccacacagtttgtattgttttgtgcaaaagtttcactacgctttattaacaatactttctggcgacgtgcgccagtgcagaaggatgagctttcgttttcagcatctcacgtgaagcgatggtttgccttgctacagggacgtcgcttgccgaccataagcgcccggtgtcctgccggtgtcgcaaggaggagagacgtgcgatatgaataacgaggaaacattttaccaggccatgcggcgtcagggcgttacccggcgcagctttctcaaatattgtagtctggctgccacgagcctgggattaggcgcgggaatggcaccaaagattgcctgggcgctggagaacaaaccgcgcattccggtggtatggatccacggtctggaatgcacctgctgtaccgaatcttttatccgctccgctcacccactggcgaaggacgtcatcctttccctgatttccctcgattacgacgatactttgatggctgccgccggaacccaggcggaagaagtctttgaagacatcatcacgcaatacaatggcaaatatatcctcgcagtagaaggtaatccgccgctgggcgagcaggggatgttctgtatcagcagcggtcgaccgtttattgagaaactcaaacgtgccgctgccggagccagcgcgattatcgcctggggaacctgcgcgtcctggggctgcgtgcaggccgcgcgacccaatccgacgcaggcaacgcctatcgacaaagtcatcaccgacaaacccattatcaaagtacctggctgcccgccgatcccggatgtgatgagcgccatcattacttacatggtgacctttgatcgcttgccagatgtcgacagaatgggccgtccgctgatgttctatggtcagcgaatccacgataaatgctatcgccgcgcccacttcgacgccggagagttcgtccagagttgggatgatgacgctgcccgcaaaggttactgcctgtacaaaatgggctgcaaagggcctaccacctataacgcctgttcctccacacgctggaatgatggcgtttctttcccaatccagtctggtcacggctgcctgggctgtgcggaaaatggtttctgggatcgcggtagcttctacagccgcgtggtcgatattccgcaaatgggtactcattccaccgccgataccgtcggtttaaccgcgcttggcgtggtggcagcggctgttggtgtgcacgcagtcgccagcgccgttgaccagcgcagacgtcataaccagcaacctacagaaaccgaacatcagccaggcaatgaggataaacaggcatgagcactcagtacgaaactcagggatacaccatcaataatgccggacgccgcctggtggtcgacccgattacgcgcatcgaaggccacatgcgctgcgaagtgaatattaacgatcagaatgtgatcaccaatgccgtctcctgcggcaccatgtttcgcgggctggagatcatcctacaagggcgcgacccgcgcgatgcgtgggcgttcgttgaacgtatctgcggcgtctgtactggcgtacacgccctggctagcgtttacgccatcgaagatgctatcggtattaaagtgccggacaacgccaatatcatccgcaacattatgctggcaacgctctggtgccacgatcatctggtgcacttctatcagcttgccgggatggactggatcgatgtgttagatgcgctgaaagccgacccgcggaaaacttccgaactggcgcaaagtctctcctcttggccgaaaagttcccctggctatttcttcgacgtacaaaaccgcctgaaaaaatttgttgaaggcgggcagttggggatcttccgcaatggctactgggggcacccgcagtacaaactgccgccagaagctaacctgatgggctttgcccactatctcgaagctctcgatttccagcgtgaaattgtcaaaatccacgcggtctttggcggtaaaaacccgcatccaaactggattgtcggcgggatgccttgcgccatcaacattgacgaaagcggcgcggtcggggcagtcaatatggaacgcctgaacctggtgcagagtattatcacccgcacggcggacttcattaacaacgtgatgatccccgacgccttagccatcggtcagttcaacaaaccgtggagcgaaatcggcactggtctttctgataaatgcgttctcagctacggcgcattcccggatattgccaacgactttggcgagaaaagtctgctgatgcctggcggcgcggtgattaacggcgacttcaacaatgtgctgccagtggatttggttgatccgcagcaggtgcaggagtttgtcgaccacgcctggtatcgatatcccaacgatcaggtcgggcgtcatccgttcgatggcatcaccgacccgtggtacaaccccggcgatgtcaaaggcagcgataccaacattcagcagctgaatgaacaggaacgctacagctggatcaaagcgccacgctggcgcggtaacgcgatggaagtggggccgctggcgcgcacgttaatcgcttatcacaaaggcgatgctgcgaccgttgagagcgtcgatcgcatgatgagcgcgttgaacctgccgctttccggtatccagagtacgttaggccgcattttgtgccgcgcgcacgaagcgcagtgggccgcaggtaagttgcagtatttcttcgacaagctgatgaccaacctgaaaaacggcaatctcgccactgcttccacggaaaaatgggaacctgcaacctggccgacagagtgccgtggtgtcggttttaccgaagcgccgcgcggggcgttaggccactgggccgccattcgcgatggcaagattgatctctaccagtgcgtggtgccgaccacctggaacgccagcccgcgcgatcccaaagggcagattggcgcttatgaagcggcgctgatgaacaccaaaatggcgatccccgagcaaccgctggagatcctgcgtactctgcacagctttgacccgtgcctcgcctgtagtacacacgtgctgggcgacgacggtagcgagctgatctccgtgcaggtgcgttaacagcgaaggagaatcatcatgcaacagaaaagcgacaacgttgtcagccactatgtctttgaagcgccagtgcgcatctggcactggttgacggtgttatgcatggcggtgttgatggtcaccggatactttatcggcaagccgctaccttccgtcagcggcgaggcgacgtatctgttctatatgggctacatcaggttaattcacttcagcgccgggatggtttttaccgtggttttgctgatgcggatctactgggcttttgttggcaatcgatactcccgcgagctgtttatcgtgccggtatggcgtaaaagctggtggcagggcgtgtggtatgaaatccgctggtatctgtttctggcaaaacgtccgagtgccgatataggccataatcccatcgcccaggcggcgatgttcggctatttcctgatgagcgtctttatgatcatcactggttttgcgctgtacagcgaacacagccagtacgctatttttgcgccgttccgttatgtggtggaatttttctactggacgggtggcaacagtatggacattcacagctggcatcggctggggatgtggctgattggcgcgtttgtgatcggtcatgtctacatggcgctgcgtgaagacatcatgtccgacgacacggtgatctccaccatggtcaacggctaccgtagccacaaatttggcaaaataagtaacaaggagcgtagttgagctaaataagtaacaaggagcgttcatgagcgagcaacgcgtggtggtcatggggctgggcaacctgctgtgggccgatgaaggcttcggcgtgcgggtggcggaacggctgtatgcccattaccactggcccgagtatgtggagattgtcgatggcggtactcagggactgaacttgctggggtatgtcgaaagcgccagccatctgttgattctcgatgccattgactacgggctggaacctggaacgctgcgaacctatgccggagaacgcattccggcttatctcagcgcgaagaaaatgagcctgcatcagaacagtttctccgaagtgttggcgctggcggatatccgcggacatctgccagcacatattgccctcgtcggtctgcaacccgcaatgctcgacgactacggcggtagcctgagcgaactggcacgggagcaactgcccgctgcggaacaggcggcgctggcgcagcttgctgcgtggggaattgtgccgcaaccggctaatgaaagccgctgtctcaattatgactgtctgagcatggaaaattacgaaggcgttcgcttgcgccagtaccggatgacacaggaggagcagggatgagcaacgacacgccatttgatgcgttgtggcaacgaatgctggcgcgcggctggacgccagtcagtgaatcccgtcttgacgactggcttacgcaagcgccagacggcgtggtgttattaagcagtgacccgaaacgcacgccagaggtcagcgataatccggtaatgattggcgaattactgcgcgagtttcccgactatacatggcaggtggcgattgctgaccttgagcagagcgaagccatcggcgatcgctttggcgtctttcgctttcctgccactttagtgtttaccggcggaaactatcgcggcgtgctgaatggtattcacccgtgggcggaactgataaacctgatgcgcgggcttgtcgaaccgcagcaggagcgtgccagttgatctaaccgcagcaggagcgtgcctcatgagcgaaacttttttccatctgctggggccaggaacgcaaccgaacgatgacagtttcagcatgaatccactgccgatcacctgtcaggtgaatgatgaaccgagtatggcggccctggagcaatgtgctcacagcccgcaggtgattgcgctgttaaacgagttacaacatcaactaagcgaacgccaaccgccgttgggcgaggtgctggcagtcgatctgttaaatctcaacgccgacgatcgtcactttatcaatacgcttctcggggaaggggaagtgagtgtgcgcattcagcaggctgacgacagtgaaagtgaaatacaggaggcgatcttctgcggattatggcgggtgcgcagacgtcgcggcgaaaagttgctggaggacaaactggaggctggctgcgcgccgctggcgttgtggcaggcggcaacgcaaaatctcttgccgacagatagcctgttaccgccgcccattgatggcctgatgaatggcctaccgttggcgcatgagttactggcacatgtacgtaaccccgacgcgcagccgcacagcattaatctgacgcaattacccatcagcgaggctgatcggctttttctcagtcgtctctgtgggccgggaaatattcagattcgtaccattggctatggcgagagctatatcaacgccacggggttacgccatgtctggcatttacgctgtacggacaccttaaaaggcccgttactggaaagttatgaaatctgcccaataccggaagtggtgctggcagcgccagaagatttggtcgactctgcgcagcggcttagcgaggtatgtcagtggctggcggaagctgcaccgacgtaaaaagacggtaagtatcgctttcagtcttatgaatatcgcaatcggcgaatacctctggtcgtagagtttcaggataaagagggagatctaccattatcgggttatttttctctcttcgcctacaggagtgcgcatgtgggatgtcattgatttaagccgctggcagtttgctctgaccgcgctgtatcactttttatttgtaccccttaccctggggctgattttttttgctggctattatggaaaccatttacgtggtcaccggcaaaacaatctaccgcgatatgacgcgcttctggggtaagctcttcggtatcaattttgctcttggcgtggctaccggcctgaccatggagtttcagtttggtactaactggagtttctattccaactatgtgggcgatatttttggcgcaccgctggcgatggaagcattaatggccttcttcctcgaatccacctttgtcgggctgttcttcttcggctggcaacggctgaataaataccagcacctgctggtgacgtggctggtggcgttcggtagtaatctctctgcgttgtggatattgaatgccaacggttggatgcaatacccgaccggtgcgcattttgatatcgacaccctgcgtatggagatgaccagcttcagcgagctggtctttaatccggtcagccaggtgaaatttgtgcacaccgtaatggcgggctacgtgaccggggccatgtttattatggcgatcagcgcctggtatttactgcgcggacgggagcgcaatgtcgcattacgcagctttgccatcggttccgtcttcggtactctggcgattatcggtaccctgcaactcggagacagttctgcgtatgaagtcgcgcaagtacaaccggtaaaactggcggcgatggaaggggagtggcaaacggaacctgcacctgcaccgttccatgtggttgcctggccggaacaggatcaagagcgtaacgcctttgccctcaaaattcccgcgctgctagggatcctcgccactcacagtttagataaacccgtgccgggtctgaagaatttgatggctgaaacctacccacgcttgcaacgcggacgtatggcctggctgttaatgcaggaaataagccaaggcaatcgtgagccgcatgtgttgcaggcattccggggactggaaggtgacctgggctacggcatgttgctctcccgctatgcgccggatatgaatcatgtcacagccgcacagtaccaggcggcgatgcgtggcgcgatacctcaggttgcgccggtattctggagtttccgcatcatggtgggctgtggttccctgctgctactggtgatgctgattgcgcttgtccagacgctgcgtggcaaaatcgaccagcatcgctgggtgctgaaaatggcgctctggagtttgccgttgccgtggattgcgattgaagccgggtggtttatgaccgagtttggtcgtcagccgtgggcgatacaggacatcttaccgacatactccgcgcactccgctttaaccacaggacaactggctttcagtctgatcatgatcgtagggctttacaccctgttcttaatcgccgaagtctacctgatgcagaaatatgcccgtctggggccgagcgcgatgcagagtgaacaaccgacgcagcaacaggggtaaaggagaaaatcatgtttgattatgaaacattgcgcttcatctggtggctgctgattggcgtgatcctggtggtctttatgatctccgacggatttgacatggggatcggctgtctgctgccgctggtggcgcgtaatgatgatgaacgccggatagtgataaacagcgttggtgcacactgggaaggcaaccaggtctggttgatcctcgctggtggggcattatttgccgcctggcccagagtgtatgcagcggcgttttccggcttttatgtggcgatgatcctggtgctgtgcagtctgttcttccgcccgctggcctttgattatcgcggaaaaatcgccgatgcacgctggcgtaaaatgtgggacgccggtctggtcatcggcagtctggtgccgccggtagtcttcggtatcgccttcggcaacttgttgctcggcgtgccgtttgccttcacaccgcaattacgcgtggagtatctcggcagcttctggcaactgctgacgccattccctttattgtgcggattgctcagccttgggatggtgattttgcaaggtggcgtctggttacaactgaaaactgttggtgtgattcatctgcgtagtcagctggcgaccaaacgcgctgcactgttggtgatgctgtgctttttgctggcgggttactggctgtgggtcggtattgatggctttgtactgctcgcccaggatgctaacggtccttccaatccgttaatgaaactggtggcagtgctacctggtgcctggatgaataattttgtcgagagccccgttttgtggatcttcccgctgctgggattcttctgcccattgctgacggtgatggcgatttatcgtggtcgcccgggttggggatttttgatggcaagtttgatgcaatttggcgtgattttcacggcaggcatcacgctgttcccctttgtcatgccgagtagcgtgagtccgatctccagcctgacgttgtgggacagtacttccagtcagctgacgctgagcattatgttggtaatcgtgctgatatttttgcccattgtgttgctctacactctctggagctactacaaaatgtgggggcgcatgacaacagaaactctccgccgtaacgaaaacgagttgtactaaggagcagaaacaatgtggtatttactttggttcgtcggcattttgttgatgtgttcgctctccacccttgtgttggtatggctggacccgcgtctgaaaagttaacgaacgtaggcctgatgcggcgcattagcatcgcatcaggcaatcaataatgtcagatatgaaaagcggaaacatatcgatgaaagcgatcttaatcccatttttatctcttctgattccgttaaccccgcaatctgcattcgctcagagtgagccggagctgaagctggaaagtgtggtgattgtcagtcgtcatggtgtgcgtgctccaaccaaggccacgcaactgatgcaggatgtcaccccagacgcatggccaacctggccggtaaaactgggttggctgacaccgcgcggtggtgagctaatcgcctatctcggacattaccaacgccagcgtctggtagccgacggattgctggcgaaaaagggctgcccgcagtctggtcaggtcgcgattattgctgatgtcgacgagcgtacccgtaaaacaggcgaagccttcgccgccgggctggcacctgactgtgcaataaccgtacatacccaggcagatacgtccagtcccgatccgttatttaatcctctaaaaactggcgtttgccaactggataacgcgaacgtgactgacgcgatcctcagcagggcaggagggagtattgctgactttaccgggcatcggcaaacggcgtttcgcgaactggaacgggtgcttaattttccgcaaagtaacttgtgccttaaacgtgagaaacaggacgaaagctgtagtttaacgcaggcattaccaagcgaactcaaggtgagcgccgacaatgtcagtttaaccggtgcggtaagcctcgcaagtatgctgacggagatatttctcctgcaacaagcacagggaatgccggagccggggtggggaaggatcaccgatagtcaccagtggaacaccttgctaagtttgcataacgcgcaattttatttgctacaacgcacgccagaggttgcccgcagccgcgccaccccgttattagatttgatcaagacagcgttgacgccccatccaccgcaaaaacaggcgtatggtgtgacattacccactagtgtgctgtttatcgccggacacgatactaatctggcaaatctcggcggcgcactggagctcaactggacgcttcccggtcagccggataacacgccgccaggtggtgaactggtgtttgaacgctggcgtcggctaagcgataacagccagtggattcaggttagcctggtcttccagactttacagcagatgcgtgataaaacgccgctgagtttaaatacgccgcccggagaggtgaaactgaccctggcaggatgtgaagagcgaaatgcgcagggcatgtgtagcttggcaggttttacgcaaatcgtgaatgaagcacgcataccggcgtgcagtttgtaatgcataaaaaagagcattcagttacctgaatgctctgaggctgatgacaaacgaagaactgtctaatgcgtagaccggaaaaggcgttcacgccgcatccggccactttcagtttgcaatacgtacgcttgagatcaggattgtctactttgagtataacatccttgtgaaatctccctttcctcataccgcttgcactatatactgcgggtaggaaaggcgcgcagagggaaatataagattgttaactatccccctctggaaatacgacttgtgagcataagataaatcttagcaaaatacaaattaaagataaggaaattgttacgaaagctattaattattgttggtaatatagtttcaagtggtactataactggctgttaaatggcatttataactattaggtgcagagatattcgcttaaatggattagtttctttgtggaaaagtaactgatgttataatgtatgatgttgactatttcactattccaataaaaccagtcagctttaaacaagcagcgtcatattaagagagataaacatttgccgctgttggtcctcgcaggccatttacgcggcaaaattccacacgtaatcctggtataagcacttctgcgtcgcggggagtgaatgcggaaatatggacctgaacttctttacgaccgtcggaggggataatgaatcctttgccgcttttgcgatcaaaggttttgacaattcctgtcattttacgggacaaacaaattccttactgaaaatactgcgctgcactatacggggttaataaaataaagccagcgatatttaagaccgccggacggctaaaataaaatttgcttaatctcaattatcatgcgttaatagctgcgtcggtttgaaagacagacagcatacaaagtagtttactaaagcagttctcattatcaggcattatccccttcttttgagtctctctcctgaacactaagtagtttctgtattaaagccctgtttgccgaaaggcccaaaatgaaggaagtaaaatatgtctaataaaatgactggtttagtaaaatggtttaacgcagataaaggttttggctttatcactcctgatgatggcagcaaagacgttttcgtccatttcaccgccatccagagcaatgaattccgcacgctgaacgaaaatcagaaagttgaattttctattgagcaggggcaacgtggccccgcggcagcgaacgttgttacgctctaaggttgccattattactcaacatctccatttccgctgtccatgttgtcatggttcacagtaccgcacatcggcattcgatgtgacggagcgaaaccctttgggcgctaagtgtattttttgtaaatcgacgatgatcacctttgataacgtcgcgctgcaaatacgcactgaccatgcgccgctggattagtcaaaataatatcaggctccctcgtggagccttttttatatctgccttatttttcttcaacgctgtatgtatagtaagcgataacctgttgattattgaatctttcggggagatggcttataacatttcttacctgaccagggtaccgggaaccaacaccttactggcgtgttgctgtcttttaagaccagaagaggttaacagtgaatattgaagagttaaaaaaacaagccgaaacggaaatcgccgactttatcgcgcaaaaaatcgccgagctgaacaagaatacagggaaagaagtctctgaaattcgcttcaccgcacgagaaaaaatgaccgggcttgaaagttatgatgtcaaaatcaaaataatgtgattttgtgaacatcaccccgtgcgaggtgatgttccgcttgttgctaatttagtgaccaatcattggcgcttgtggaattaagcgtcggtacaattcctccggcaccgggctttgccatactcccgcatacattgcgtaaccaatcaccgcaaacataatccccagaaccagtagcgtcattaaccagccagacaacgcaaaggcttttttatttgccgcaggtttttgcagactaaaggtcaatgtactggctaccggacaactctctacgcaagtcatacagccggtacattccactgttcgtacctgaattaatttatcgaccgggatccgacttgggcaattttttgcgcatttgccacagtcgatacaactttcggcattgcgacgaatcttaaacgggctcaataggctaaccacgcccatcagcgcgccatatgggcaaagataacgacaccaggcatggcgaataaacaggctggcaatcagcaaaacggtcacgctgattaatgtcgcggtccccatatgacgaaagaaatcgagcattttaacgtccatcaccacgctgtaggggctcaacataaaatagtgaatcgcctgagcgggcatcaataacgcgatatagataaaaaaactcaacagcaaatacttcacgccgcgcagaggaatatccagccagcggggaaggacacattgccgaccaaacagtttgttaccgagatcgccgattaattcagaaagcgtaccaaccgggcataaccaactgcaaaaggcctttttgagtaatagactgatgacgataaaagcgaccaataacagcatcgcggcggcgtggacggacggtaactgacctgttacaaggctatatttcagattcatcagcccggcaatcggtagccagccttcgatacctcccggtctggcgacaaatgtcgtgctacttgccgtttcgtaatagcgcacccaataccagaacgtgatggcaatataaatattcattgccaacagtaataattgcgtcgctttacgccaggtcgtggcattacgccagtcattccacggtaatttgccgcccgtcgtgcctggccgccgctgccagcgggttcttttattctctgccatgattttgccagtccgttaagttgtataccaaatgccactattctagttgttcttaactggctgatattgattcaaatcgcgttcaggtctttcttatgcaaccatgcttccagagcggcaacactgcgtgtaatttcttcgtgtggaaggggggcagataatggctgctgctccagttgtgcgcatagctggctggcgatatgcattcccagactgctgcaactgctttttagctgatgcgcggcacgctttattttctcgctatcctgactggcgcgggcaatgtcgatttcatcgagaagcggcagggcatgttgtgtaaataataccagccattcgtggatcttctccgtccccattaactgagcatcttcattgagttggcttacatccaggctttgatcattattgacttgcagttggagatagtgcgccagtaactgaccgagcacttcacgcggcaccggtttagggataatcccgcggaataaactactggtacgctggcgcagcgtttcgtcaatgacatgggcgctaaagccaatcaaaaccaggctcggatattgctgtgccagttgtcgggcaagcgtaatgccgtcgatatccggcagatcaaaatccaccagtgcggcagcaaacggttcgctattttgcagtgtctctaaagcctgcgcggcattgccaacagcaacaatctgcgcaccactggttttcagcatctcaatggtaattcgctgggttagcgggttatcttcaattaacagcaaacgtaaaccgtcaagacgcaccgcctgattgactgtttttggcacgggtgccgtggcaacacgtaacggcaagcgtaaacaaaaacagcttccaacctccggcgtgctggtggcgctcagttcgccgcccatcgcctgggccagacggctactgatagtcagtcccagcccggtgccgccgcgtttgccgcttacctgcacaaatggctggaagatttctgccagtttcgcgggatcaataccgcagccgctgtcttccacttcgaccagccattgctcgccatcagtgcgactacgcaggataatgtacccttcgtcagtaaaacgcagggcgttgctcaacaggttggttataacctgacgaatacgtcgtggatcgcccattaacgcgcacggcatatcatcggcaattgccgttgccaggcgaatcgggcgacctttcacccgtccgctcattaattgcagggtactttccagcagcgggcgcggttcaaagggctcatcgctgacgctaacattcttgccacctgcttcgatagcggaataatcgagaatatcgttgaggatggtcagcaagctttcaccagagtcagtaattgcccgcaaatcatcacgctgggcgttaagtgcggggttatctgccagcagttgagcagtgccgagaataccgtacagcggtgtgcggatctcatggctcatcgccgccagaaacgcgctttttgcctggctggctttttctgcttccgcccgtgcctgtcggtgttctatcaccagttcctgcaattcagctgtacgcgctttgacctgcgccgccagctgttcgcggtggcgattcagtgcatgaacattgctgcgaaacgcatccatcagccgcccgatggtatccagctcccgtacgccagcggtttccgggaaaggggagtcaatatcaccgtccagcagccgttgcagcgcctgcgtttgttcggcaagtggacgcgtgacactgcgataaaccacgcgccagaggatcagaatcagtgcgcaaagactaaccatccccagcaataacaggctgtattgcccgcgtgcactcgctttttccagatgcgccagtccgtgctgattacgcagctcaatggtgtcgaccagctgactgacttcgctactaaactgcgcgaactgggcgatgttattttgtgcgagagtttgtaggtgattgctgatttcactgtcctgctgatacagcgccagcaaatcgctatattggctaacggtagttaacgttgttgcgacctgcgcacgaacacccggatcttcaatgcgtatttgccgacgttgcagaattttcaccgcattattgagctgcttttccagcgttggtgcatttttctggatctgctccagccccagattcatcaccatttgctgcacccgcagagcgctaaggcgcagttcattcatctggttaacatactcaagatcgatatcaatcagccgatcgagtgcactttcagcagcctgacgctgatcttgttcgatcaaatcgtaaatcccggcctgggtcgctccagcggaagttgtcgcattattcgcctgaccttgcgccaggcgtgcgatctcatcggcggcagcgactatctgctgactgagttgctgttgttgctggcgcagttgcaaacgctgccccaccagttccccttgctgacgtaagctacgggagatctcctgctcctgttgttcaatagcggtggtatcaaaaccttgttcccgtaacgcttgcagcaacgcattaatcttcaggctttgtgcggtgagcattcgcccctgcgcctgccacatcttttcgttatcggcactggtcaggttctgcgcggcgaaaagttcccaggcgctggcttcgctcaactggcgcgccatattcatggtaggaatcaatgcctgagtgttgtctttttccacctggctgataaagcgcaggttgtaccatcccaccagggtactggtcagggttaacagcgccatcagggcaaagcccatccagagtcttcgggtcagggttaaattcacggtcggtgcactttaggtgaaaaaggttgagtcgcaaagcggaatgcatctagcataaagccttattattgatgaggctatcatgcgcgtactgctatttttacttctttcccttttcatgttgccggcatttagcgctgataacctgttgcgctggcatgatgcgcagcatttcacggtgcaagcctctacgccgcttaaagccaaacgcgcatggaaactgtgcgcgctttatcccagcctgaaagatagttattggttaagcttgaactatggtatgcaggaggctgctcgccgctacggtgtggatttaaaagtgctggaggcaggcggctacagccagttggctacccagcaagcacaaatcgaccagtgtaaacagtggggcgcagaggccattttgctcggtagtagcacgaccagttttcccgacctgcaaaagcaggtagcaagtctgccggtgatcgaactggtaaatgctattgatgctccccaggtgaaaagccgcgttggtgtgccctggtttcagatgggctatcaaccggggcgatatctggtgcaatgggcgcacggtaaaccactgaatgtgctgttgatgcccggacccgataacgccgggggcagtaaggagatggtcgagggttttcgcgcagccattgccggaagcccggtgcgtattgttgatattgcgcttggtgataacgatattgaaatccagcgtaacctgttgcaggagatgctggaacgccatccagaaatcgacgtcgttgccggaacggccattgcggcagaggcggcaatgggggaagggcgtaacctgaaaacgccgcttaccgtggtgagcttttatcttagtcatcaggtgtatcgcgggctgaagcggggaagagtgattatggctgccagcgatcaaatggtctggcagggggaactggcggttgagcaggccatcaggcaattacaggggcaaagcgtttctgataatgtcagcccaccgattttagttctgacgccgaaaaatgccgaccgtgaacatattcgccgcagcctgagtccagggggatttcgtccggtctatttttatcagcacacaagtgcggctaagaaataatcagcacacatcagcggctaagaaataaccttcaccatgttgcgtcaccagtaaatccgcgctgagtttatgacgtaaacgacgaattaacacatcgacggtgcgcaggtcagggttttccacccgacgcgcagaaagcatacgtagcagacgttcacggctgagaatttcgcccggattcgtcacaaatgccaccaacatttcatactctgcgcgggtcagtttaatcggctcgccatcccgctccagcgtatggcggctcacattcaggcaataaccggcaaagcgatagcagttgtcctgagtgtgcggttgagcttgtcgcgcgaggtcgattcgccagagcagatttttcacccgtactaccagttcgcgcagttccagcggtttggtgacgtaatcgtctgcgcccatttccagcccaacaatacggtcaatccgatcgctgcgtccggtaaccagaataatccccaccgtactgcgttctcgcagggcgcgggttaacatcaggccattttcatcgggtaagttgatatccagcagaattaaatctacgctctgattctgcataatttcccgtagcccagcaccgctcgccgtaacggaaacggtatacccctcctgagtgaagtaggattgtaatcgcgcctgggtaaccggctcatcttcaacaataacaatgtgatgtggcatcagagggttttactcattctgttcatatctgttcatattctgccgtaagccgttcatcctgaccagtgccgctgttcatatttgctcattaagatcgcttcactaaaccataattctacaggggttattatgcggaaactctggaacgcgctacgccgacccagtgctcgttggagcgtactggcgctggtcgcaattgggattgtgattggcattgcgctgattgtattgccacacgttgggatcaaagtcaccagcacaaccgaattttgtgtcagttgccacagtatgcaaccggtgtatgaagaatataaacagagcgtgcatttccagaacgcctccggcgtgcgagctgaatgccatgactgtcatatcccgccggatattccaggcatggtgaagcgcaaactggaagcgagcaatgatatctaccagacctttattgctcactccattgatacacctgaaaaattcgaagccaaacgcgcggaacttgccgagcgtgaatgggcgcgaatgaaagaaaacaacagcgcaacctgccgctcctgccataactacgatgcgatggatcatgcgaagcagcatcctgaagcagcacgtcagatgaaggtggcagcgaaagataatcaatcctgcatcgactgtcataaaggtattgcccaccagttaccggatatgagtagcggcttccgtaagcagttcgatgagctgcgcgccagtgctaatgacagtggtgacacgctgtactctattgatattaagccaatttatgcggcgaaaggcgataaagaagcctctggttctctgctgcctgctagcgaagtgaaagtccttaaacgtgacggcgactggctgcaaattgaaattaccggctggacggaaagcgccggacgtcagcgtgtactcacccaattcccaggtaaacgcatctttgttgccagcattcgtggtgatgtgcagcagcaggtaaaaacgctggagaaaaccaccgttgccgacaccaataccgagtggagcaagttgcaggccactgcgtggatgaagaaaggcgacatggtgaacgatatcaaaccgatctgggcttatgcggatagcttgtacaacggcacctgtaaccagtgccacggcgcaccggaaatcgcccactttgacgctaacggttggatcggcacgctcaacggcatgattggctttaccagtctcgataaacgtgaagaacgcaccttgttgaaatatctgcaaatgaatgcgtctgacaccgcaggtaaggctcacggcgataagaaggaagaaaaataatgaacaataacgatctctttcaggcaagtcgtcggcgttttctggcacaactcggcggcttaaccgtcgccgggatgctggggccgagtttgttaacgccgcgacgtgcgactgcggcgcaagcggcgactgacgctgtcatcagcaaagagggcattcttaccgggagccactggggggctatccgcgcgacggtgaaggatggtcgctttgtggcggcaaaaccgttcgaactggataaatatccgagcaaaatgattgccggattgccggatcacgtacacaacgcggcgcgtattcgttatccgatggtacgcgtggactggctgcgtaagcgccatctcagcgatacctcccagcgcggtgataaccgttttgtgcgcgtgagctgggatgaagccctcgacatgttctatgaagaactggaacgcgtgcagaaaactcacgggccgagtgccttgctgaccgccagtggttggcaaagcacggggatgttccataacgctagcgggatgctggcgaaagctattgccttgcatggtaatagcgttggtacgggcggagattactctaccggtgctgcgcaggtgatcctgccgcgcgtagtcggtagcatggaagtgtatgaacagcaaacctcctggccgctggtattgcagaacagcaaaaccattgtgctgtggggctccgatttgctgaaaaaccagcaagcgaactggtggtgcccggatcacgatgtttatgaatattacgcgcagctaaaagcgaaagtcgccgccggtgaaattgaggtcatcagcatcgatccggttgtcacatccacccatgagtatctggggcgcgagcatgtgaagcacattgcggttaacccgcaaactgacgtgccgctgcaactggcgctggcacatacgctgtacagtgaaaacctgtacgacaaaaacttccttgctaactactgtgtgggttttgagcagttcctgccgtatctgctgggtgagaaagacggtcagccgaaagatgccgcatgggctgaaaaactgaccggcattgatgccgaaaccattcgtgggctggcgcggcagatggcggcgaacagaacgcaaattattgctggctggtgcgtgcagcgtatgcagcacggtgaacagtgggcgtggatgattgtggttctggcggcgatgctggggcaaattggcctgccaggtggtggttttggttttggctggcactacaacggcgcaggcacgccggggcgtaaaggcgttattctgagtggtttctccggctctacgagcattccgcctgttcacgacaacagtgactacaaaggctacagcagcactattccgattgcccgttttatcgatgcgatcctcgaaccggggaaagtgatcaactggaacggtaaaagcgtaaaactgccgccgctgaaaatgtgtatttttgccggaactaacccattccatcgccatcagcagatcaaccgcattattgaaggcttgcgcaagctggaaacggttatcgccatagataaccagtggaccagtacctgccgctttgccgatatcgtactgcctgcgaccacgcagtttgagcgtaacgatctcgaccagtacggcaatcactccaaccgtggcattatcgccatgaaacaggtggtgccgccgcagttcgaggcgcgcaacgacttcgatattttccgcgagctgtgccgtcgctttaatcgcgaagaagcctttaccgaagggctggacgaaatgggctggctgaaacgcatctggcaggaaggtgtacagcaaggcaaaggacgcggcgttcatctgccagcgtttgatgacttctggaataacaaagagtacgtcgagtttgaccatccgcagatgtttgttcgccaccaggcattccgcgaagatccggatctcgaaccgctgggcacgccgagtggcctgattgagatctacagcaaaactatcgccgatatgaactacgacgattgtcaggggcatccgatgtggtttgagaaaatcgaacgctcccacggtgggcctggcagccaaaagtatccgttgcatctgcaatctgtgcatccggatttccgacttcacagccagttatgtgagagcgaaacgctgcgtcagcaatatacggtagcgggtaaagagccagtattcattaacccgcaggatgccagcgcgcgcggtattcgtaacggtgatgtggtacgcgtctttaacgctcgcggtcaggtgttggcaggggcagtggtttctgaccgctatgcacccggcgtggcacgaattcacgaaggggcatggtacgatccagataaaggcggcgagcctggtgcgctgtgcaaatacggtaaccccaacgtgttgaccatcgacatcggtacaagccagctggcgcaggcgaccagtgcgcacactacgctggtggaaattgagaagtacaacggaacagtggagcaggtgacggcgtttaacggccccgtggagatggtggcgcagtgcgaatatgttcccgcgagccaggtgaaaagttgaattaacccgcgtcgcaggtgaaatcatgaccacgctgacagcacaacagattgcctgtgtttacgcctggctagcgcagttgttctcccgtgagctggacgatgaacaactgacgcaaatcgccagtgcgcagatggctgaatggtttagcttgctgaaaagcgaaccgccgctcactgcggcggtgaacgagctggaaaaccgtattgccacgctgacagtacgtgacgatgcccgtctggaactggccgcggacttttgcggcctgtttctgatgaccgacaaacaagcggcgctgccgtatgcaagcgcctacaaacaggacgagcaagagattaaacgcttgttagttgaggcagggatggaaaccagcggcaatttcaacgaaccggcagatcatctggcgatctatctcgaattgctcagccatctgcattttagcctgggagaggggaccgttcctgcgcgaagaatcgacagtttgcggcaaaaaacactgacggcgctgtggcaatggttaccagagtttgttgcgcgttgtcgtcagtatgacagctttggtttttacgcggcactaagccagttattgctggtgttagtggagtgcgaccaccaaaacagataacgtcgtttgtgcgcctgaaaagacgcgtttagcgtcgcatcaggcattatggcgcagttgccggatgcggcgtgaacgtcttatccggcccacaggaactgtaatctttgtagaccggttaagatgcgtcatcgcatccggcaaacacacatcacggatgagctacaaaccgggaaagccgctggcgcagcaggcggttttcctgcttcaggtgcgcaatatcatccattaacgtcagcgccaccgcgatccccggccagtccagagccagttcatgacgcaggcgtaccgcgcgttgcaccacaatggcggcatggtcgtcaaatacccaggttgtttcctggatctcacgcggttcaaccacccccaaaccgacaatttcattcaactcctcttcagagatgccggtatgcaggcaaaattcggtaatagtaaaagtcaccgtaacattagccattatgctttcccccaatctttacgtggatcaaaagagctctgggcgtctgccagttgctgccacagcgcggcagtgttttcatccggtttcggcggcatcacgattttcagtaccgcatacagatcgccggtctgttttttgctcaccagacctttgcctttaacgcgcaatcgttgcccggcctggctgcctggcgggatagtcagcaaaatgctttctttcagtgttggaacggtgactttagcacccagcgccgcttcccacgggctaaccggcaccacaatttccagatcctggccgacaatatcaaacagcggatgtggcgcaatatgaatcaccagccacaaatcgccatttggaccgccgttttcgcccggcgtcccctggcctttcagacggatgcgttgaccattgccgacgcccgccgggatcttcacattcagcgttttcggaatttcctgttcgatcatgccaaaggcgttataaaccggcaggttatagctgatggtacgcttatgctcagtaagcgtttcttcgaggaataccgccacttcgatttcaatatcgtggccgcgtgtggcggggcgttgacggctctggcgggcatgctgaccgaaaatactgctgaagatatcgtcaaaatcttcggcgttaaaactctgaccgtcgccatggtggaactgacggttaaattgcggatcgttgcgatgttgccacatctgatcatactcagcgcgacgttgttcatcacttaacacttcccaggcttcagcgacctctttgaagcgggcttcggcatccggttctttgctgacatcaggatggtatttgcgggcaagtcgacgataggcggtcttgattgtcttgagatcgtccgtcggtttcacgcccatgatggcgtaataatcctttaattccatagcgttatctcgcgtaaatcaacacaaattgaaggaacccctgtaaggtaactcctataagtgtagggtaatcctcaaaatttcatatgccaacacagaatatgttattgaaatcatcgcggagaggaggtcgccatcaagatgggttgctgaacatattttaaacaggtgaaaaagggtgagcgatttttgatagttgaaccaggcactttaagtttaactagggcgtcattatttattaaattttatagacgctatatatgggtagtaatatacatggaattagttgcactgcaaataattatttgaaacaggcctggaacgatataaaaaatgagtacgaaaaaaatcaaacatatagtatcacgctttttgaaaacacactggtgtgttttatgcggttatacaatgaactcagacgtaaagtaaatgaagaggatactccatgtctggaatgtgaaagtctagaaaaagaatttgaggaaatgcagaatgataatgatctaagtttatttatgagaatattgcgtactaatgatacacaaatttatagtggggttagtggaggtattacatatactatacaatatgttcgagatattgatattgttagagtgtccttgccgggcagagctagtgagtctatcacagattttaaaggttattattggtataactttatggagtatattgaaaacattaatgcgtgtgatgatgttttttctgagtattgttttgatgatgaaaatataagtgtccagccagagcggataaatacgccgggaatatctgatttggattctgacattgatttgtctggtatatcttttattcagcgtgaaactaaccaggcattaggattaaaatatgctcctgtagatggcgatggatattgtctgttaagagctatactggttttaaaacaacatgattatagttgggcgctggtcagttataagatgcaaaaggaagtttacaacgaattcattaaaatggttgataaaaaaacgatcgaggctcttgttgatacggcattctataatctcagggaagatgtaaagacgttatttggcgttgatctacaatctgacaaccaaattcaggggcagagtagtcttatgagttggagctttctgttttttaaaaaacaattcattgatagttgcttgaataacgaaaaatgtatcctgcatttacccgagtttatatttaatgataacaagaacttgcttgctttagataccgacacgagcgataggattaaagcggtgaagaattttcttgttgttcttagtgatagcatttgcagtttatttattgttaatagtaatgtggcaagtatctccttggggaatgaatcctttagtacagatgaagatcttgagtatggttatttaatgaacactggcaatcattatgacgtttacctccctcctgaactttttgctcaggcttacaagttaaacaataaggaaatgaatgcgcaactcgactatttaaatcgttatgcaatttaatggcaaaggcatatgctaaaaaccattgttattagtctcacacttttttattggtaaatattgtctctgtattggtaacgccgcagatattctgtttagccacaggtgcaattatcagcggcgtacgcgaggcaggggctaatcaggcatagtttgcgtcaaaccttgcctgtttttgaagatgtatatagaaaaacaggcgttcaacaagccattttgcgaacctgttcccggaaaaaagtcatatttctgtcacactctttagtgattgataacaaaagaggtgccaggaatgaacaaaacgctaatcgccgcagctgtggcagggatagttttactcgctagtaacgctcaggcacaaaccgtaccggaaggctatcagctacagcaagtgctcatgatgagccgccataacttacgtgcgccgctggcgaacaatggcagtgtgctggagcagagtacgccgaataaatggccagaatgggacgtccccggtgggcaactcaccaccaaaggtggcgtgctcgaagtgtatatgggccattacatgcgtgaatggctggcagagcaggggatggtgaaaagcggggaatgcccgccgccgtacaccgtttatgcctatgccaatagtctgcaacgtaccgttgcgaccgcacagttctttattaccggcgcattcccggggtgtgatattcctgtgcatcaccaggaaaaaatgggcactatggacccaacctttaacccggtgatcaccgatgattccgccgcattcagtgaacaggcggtggcggcaatggagaaagagctcagcaaactccagcttaccgacagctaccagctactggaaaaaatcgttaactataaagattcccctgcctgtaaagagaaacaacagtgtagcctggtggatggcaaaaatacctttagcgccaagtatcaacaagaaccaggtgtttccgggccgctgaaagtcggcaacagcctggtagatgcgtttactttgcaatattacgaaggttttccgatggatcaggtggcctggggagaaatcaaatctgaccagcagtggaaggtgttgagcaagcttaaaaacggctaccaggacagcctgtttaccagtccggaagtggcgcgcaatgttgcgaaaccgctggtcagttatatcgacaaagctctggtcaccgatcgcaccagcgcaccgaaaattacagtgttggttgggcacgactccaacattgcctctctgttaacggcgctggatttcaaaccgtatcagttgcatgaccagaacgaacgcacgccgattggcggcaaaatcgttttccagcgttggcatgacagcaaagccaatcgcgatttgatgaaaattgaatatgtgtatcagagtgcggaacagttacgtaatgccgatgcgttaaccctgcaggcacctgcgcagcgtgtgacgctggaattaagcggttgcccgatagacgctgatggtttctgcccgatggataagtttgatagcgtgttgaatgaagcggtgaaataacagaaaactcccccgcgagaagcgggggagtcgctggttaaacgtttttacgttcgatggtctgttcgccccaaaaaaggctatctttatcggtcttagcaaaggctttgactaacacttcatcactaccttcttcccaaatcttttccgccattttttcgtcgtacccggcgacttcgaaaatggcctcggctatttccgggctcgtattgcgcagagatgcccattcaccgacgtgatgagctttcgcttcttgagttggcatgcgtatcctcctgttgaagattagccgttaagtttaactgccagacctgcgacatattccccttgataacgagcaatagacagttcttcctggctgggctggcgactaccgtcaccgcctgcgatggtggttgcgccgtacggcgtaccgccgcgaacctgactaacgtcaaataattcctgcgctgcgtagccaatagggacaattaccatgccgtgatgcgcaagggtcgtccaggtggatgtgatggtttgttcctgaccgccgccagtaccggtggaactaaagacgctcgccagttttccgtatagtgcgccggaagcccacaggccgcccgtctggtcgaggaaggtacgcatttgaccggacatgttgccaaagcgggtaggtgtaccaaaaataatggcgtcgtaatcggccagttcttgcggggttgcaaccggtgcagtttgcgttttaccgcctgctttttcaaataattgcggcggcatggtttccggtacacgcttaacgacaacttcagcgccatccactttgcttgcaccctcagcgactgcgcgtgccatcgtttcaatatgtccgtacatggaataataaagcaccagaactttagccatttctaaccactcctcgtgttatctctattccgtagcgattcgctaccacttatttaaagataagacgtccttttcagagtgcaaatttcacaaccacttatttgatttataacaactttcacaagcacgtaattttgtcgcaaaatgacacatttttatctcatcgcgtttttttaatcataagagcggcttatggataattattggagatgatatctattctcgctaagaagctgttgcaggatattaccaaacgcgggtctgcccgcgtcagttcactaagcttagtcccacgtagcgaaaatatggcagccgccatacgccgcgttaattctatgcaatatgatgtctatacccagacggaggtcagtaatggcaaaccatcgaggcggttccggcaattttgcagaagaccgcgaaagagcaagtgaagcaggtaaaaaaggtggacagcacagcgggggtaatttcaagaatgacccgcagcgcgcatctgaagcaggtaaaaaaggtggtaagagcagtcacggcaaaagcgacaactaaccgggctaatcaatgacgaatgcatttttgtctgtagctcgtcaaaaagccatcaccgccggttacccggtggttgatactgatgacaaatgtaagcttgcctgatgcgcgatgcttatcaggcctaccagaagattgcaatatattgaatttgcactgttttgtaggccggataaggcgtttacgccgcatccggcatgaacaatgcgtacgttgtcaacaatctgcaccgccggtaaccccggcggttttctgtttatggctcctgatgaacaacttctggcggtggaacgtcaaccaactttctgcttaacaacgcattgagtaaaatcgcgccaaaggttgctgtaccaatccctcccaacgtaaaaccgcccagcgtgagagcaaaatcacccgcgcccagcactaaggttactgcgaccataatcaaattaccgttctggcttaaatcgacacggttttgtacccatatccttgcgcctgcgacggcaatcagcccgaacacaacaatacttgcaccaccaataaccgcggccggaatggtatgaatcagcgcaccaaatttcggactaaagcccaacagcatggcgatgacggcagcagcaacaaacaccagcgtgctgtagactttggtcacggccatcacaccgatattttcagcataggtggtcacgccgctaccgccgacagagccggaaagcatcgttgccagaccatcgcctacgaatgcccgccccatatacgggtccatattgcgtccggtcatcccggcgactgccttgagatgacctaagttttccgccaccagaatcaccgccacgggcgcaatcagcatcattgcctgaccattaaaagcaggagtggaaaaatgtggcagaccgaaccaggcagcatggctgacgagagtaaaatcgacggcttttcccagccctaaaacgttggtcatcacgccatacagcagacaggcgacaattaatcctacgagaatcaataaccgctggatcatgccacgggtaaacaccgccaccagcccaatacacagcaccgtcattaccgccatccagctatcaaaggcgctagcgcttacacttttcactgcgataggcgctaagttcaggccaatcgccatcaccaccgcacccgtcaccaccggcggcatcagtcgttcaatccagcgcgtaccgattttcatcaccaccaggccaatgacggtataaaccagcccacaggcgataatcccgcccagcgcaatgctgatattcgggttaatgccctgaccgttaaagcccgtcgcggcgatcaccacgccgacaaaagccgcgctggagccgagataactggggacgcgcccgccggtaataaagaaaaacagtaacgtgccgatcccgctcattaaaatggaaagattgggatccagccccatcagaatcggcattaacaccgtcgcgccaaacatcgccaccgcgtgttgaacgcccattactgccgtctgagcaaacggcaatcgttcatccggcgcgaccacgccgctctctgtagaggtgctttttaactgccagtgaggaaaaccgaacattgccatcagctgtctccttaaggaggttaacaagcagggcgcatcagcgcgtgataactgcgatcgaaccacaccagcccgtagggtgtggtgtgacgatgaatcgcttcgatggcgcaaaacagaatgtcgtgggtgccgacgctcaccacctggctgatacggcagtcaaagctaaccagagcctcttccagttgcgggcatccggtcacccccgtctgccagcgggcggcggcaaagcggtgttccatgggcgttttgccgccaaaaaggttactaagcggctcctgcccggcgctaagtgtatttacacacagcgttcgattttcattgaatgccggccagacggacgccccacgattcaggcacaccagtaatgtgggcggcgtatcggtcacactgcagacggcgctggcggtgaacccggcgcgcccggctggaccgtccgtggtgataatattgaccgccgcgcccatgcaggacatcgcatcgcgaaaagtttgttgatcgacaatgttcatagtttgctccttacaacagcccgcaggcttcttcaaaggacagacgtggcaggcgcgcataaagcttgctgctatcgccatagccgatattaatcagcagattgctcttcagcgtgctgcccgtaaaaaaggcgtcgtccacgtgttgacggtcaaagccgctcatcgggccggtatccagtcccagcgcccggcaggcgacgatcagataggccgcctgcatggaactgttgcgaaacgctgtttcttcggcaagttgtgggctggaggtaaaccaactgcgggcatcaccgtggggaaacagtagtggtaaccgttcataaaattcactgtcccaggcgacgatagcggtgacgggcgcggtcagggttttttgcagattgccgctggaaagtgccgggcgcagacgttcttttccttctgccgtgcgggtaaacacgatccgtgccggagaacagttagcacttgtcggcccccatttcatcagggcataaatctcccgtaacgtctcatcgctgacgggtgtctcccgccagccgttgtgagtgcgggcatcggtgaacagggtgctaagcgcacctgggctaacggcttcgttcatagcaattccttacagggcggcttcacggtgatgtaacaggctggcaagcccgttgagtaacagagcattaaacgtttcgggatcggtcacgttgcaggcgtgtccgccatagggcatcaccattttctggctatcgggcagggcggcatgaagttcactggaacatgctgttggcaccagcagatcatcactggcgcagatgatttgcaccgggcagcggatgcgatccgcatggtgactaaagtcagcgcgtttgagggcgttaagtcgacgcagtaaattatttttgccctgaaaatgcgccagtgccagcgcgtcttctgcctccaggcgaggtgcgcgggccgccatccagtcggcgggatagaggaacaacggctgcgcttccacccatgcctgcgcgccgccgctatacagtaatcgttcgcgaacctgaaaacagcggcgcgtatgggcgtttattcgtagccagccgttaacgctgatcagcacagttacgctcgcgggataatccagcgccagctgcattcccaccagcgcaccgagcgcatggccgaccactgcgtaatgctcaatccctgcggctaccagcgcctgatgcagttccgctgccatctgggcgatactgtaatcttctgccagcgtgtcgggattattgccggtgccgcgctggtcgtaacagactacctgatactcctgctccagcaccgccagttgcggtaaccagtaactgccgctacccccaagaccgctaatcaacaccactacgggcgcatcagcataagggggaggactgagactaagtttcatcgcggcctcacttggcgatatgcgcaattgtggcgatttccaccagcgcgtcaggttttaccagtccgcactgaatgcagaatcgcgccggtttatcacccggaaaaaactcggcgtagatttcgttaatcgcggcgtaatttttccagtcggtaataaagatgctgttgaaggtcacatccgccatcgtgccacccgccgtctcgatcaccttgcggatagtttccagaacgtggcgggtttgcgcctttgggtcatcggcaaacagcacgttattatgttgatcaaaagccagcgtaccggagacatacaccacgccatcagccagcgtgccgggaacgaagggggccagcggtgcgctgctgccagcgggaataattacggattttggcatcgttaaactccttaagcgatatgagcaaaggacgtgggagaaagcgcgtcgcagaatgtttcgacgtcgctgacccagccaaaaaaggtttcgatattgaacaacgcggctttctgcgcaaatttcggccccgcctggtgagttgcgtcttcaagcaccacgccgaaatactccagaaaaaagccgtcgcgtagcgtgctttcgacgcagacgttggtagcgatgccggtgaaaaccagatggcgtattccgcggctgcgcaaaatgctgtccagcggcgtattgaagaaaccgctgtagcgcggcttcggcagcacaatatcgccaggctgcggcaccagttcatccaccagttgataatcccaggagcctttcgccagcaatttcccctgcagctgcggctgcttacgcatggttttcagggcgttgcttttatgaaaattcggactgccgggtccgccagcctcgacatactgttcatcccagccattttgaaaccagatgatcagcatccctgccgctcgcgctgcggtcacggcggtttgaatgttggcaatgaccgggcgagtggtactgacatcaaacccggcgagatctaagtagccgcctggcgtggcataagcgttttgcatatccaccacgatcagcgcactttgctgcggatcgaaggtaatggcttccggtcgagcggttaaggtcgtcatcatgccacctcctgagtcagcgcaggtagatgggcgcggcattgcatcagtggttgaatgcgctcgccgaaggtttcgattccgctcagaaaatcgtcgaaggttaacagcacgccttcggcaccaggcacgcttgcgacttcatctaacatgcgcgcgacactggcgtaagaaccgactaacgtccccatattgatgtttaccgcgctagtgggatcggccatctgacgaacgttggtgtcagtaccggagcgggtatctttctgactttgttcggttagccagcttaacgcctcttcatccgcgcccgctttgtagtgttcccatttggcgcgagcggcatcgtcggtttcatcggcaatcaccataaacaacacataagagccaacgtcgcgtccggtttgctctgcggcctgtttcatccgcgcagcggtcggggcgaaagccgtgggtgtatttacgcctttgccgaaacagaagttgaaatcggcataccgggcggagaacgccatgccagcgtcgctttgcccggcgcagatcactttcatggggacactcggttgcggactcacgcgacaatcattcatggtgaaaaaatcgcctttaaaatcgcttttccccgtgccccacaggtcgcgcagcacctgaacatattcggtgagatagtcgtaacgacgggagaaatagtcatcgccaggccagatacccatctgctcatactcgggcttttgccagccagtcacgaggttgacgccaaaacgcccgccagagatggagtcgatggttgcggccatacgggcgacgattgccggaggtaacgttaaggtggcagcagtggcgtaaatctgaatgcggctggtcacggccgccagccccgccatcaaggtgaagctctcaaggttgtgatcccagaactcagttttgccgccaaagccacgcagtttgatcatgctcagggcgaaatcgaaatggtagtgctccgctttttgcacaatggctttattcagttcaaaggtcggcatgtactgcggcgcgtgggtgctaatgagccagccgttgttgccaataggtacgaatacgccaattttcatcatcaacctctcttcgtctcgtaaagtgaaagtcagacggggcgctgcatcctgcatatccttttcagccgcgtattggcttgtttgcaaagcggatgccagtttttaaaaagttaatgttattaatctgttaacattacgttatctaaaatatctggtaaaaagtggactaaacggtcaaaacagttgcacataaaacatgcatctgtgcgcgatgagagtgcagaaggtcgaggccgggcgggggttttgctatcctgttgccaatctacaagaggggagagcgcatgacgcaaggcgcagtgaaaacaacgggtaaacgtagccgcgcagtaagcgcgaagaaaaaagcgattcttagcgcagcactggacacttttagtcaattcggttttcacggcacaaggctggagcagatcgcagagttggcgggtgttagtaaaaccaatctgctgtattactttccgagtaaagaggcgctgtatattgccgtgctgcggcagattctcgatatctggctggcaccgttaaaagcgtttcgtgaagatttcgccccgctggcggcgatcaaagagtacatccgtctgaagctggaagtcagtcgcgattatccgcaggctagtcgcctgttctgtatggagatgctggcaggcgcgccgctgttaatggatgaactgacgggcgatttgaaggcattaattgatgagaaaagcgcgctgattgccggttgggtcaaaagcggcaaactcgcgccgattgatccgcagcatttgatttttatgatttgggcttccactcaacattacgccgatttcgcccctcaggtggaggcggtgacaggcgcgacgttgcgcgatgaggtatttttcaatcaaacggttgaaaacgtgcagcggattattattgaggggattcgaccacgttaaagatgccggaggaggttgtaacatcctccggctacctgtttaacctatagtcattaagctggcgttaccgccagcggcagcggtattcacactcaggctacgctcgatatacagccgttccagaaggatattgctttcgccacgggcaaaaccctgcacgctaacaattgtgccatcccgcgcggcaactgcttcacacaatgcgcgaagctgatcgctatcaccgtggaagatcaccgcatcaaacggttgagcggttatattttccgctttcgccagttgaatacgttcgctgactgcgcttggcaatgccttcactaactgacgatgcagcgcgtcatccggccacagtacctggctgcccaccgccagcacggcggcgagctgagtcagcgcatcctgctcatcatcggcaatacacaacacgcgctcacgcggcagcagcgtccaggtgttgcgttcacccgtcggccccggcagcaatcgttgtgttcctgcctgcgccagctcgccatattgcgtacataacgcctgcaattctggacgatttgctgcccattcccgcagtgcatttagcggctgagtcaatgcggctttcaactgcgcatcgaccggatactttgcatcctgacgcgcgagcgtcactgccagcgcactttccgggcgattcgccagcagacggtagagatagagcggaccgcctgctttcggcccggtaccggacaacccttcgccgccgaacggctgcacaccaaccactgcgcccaccatattacggttaacatacaggttaccaacatgggcgctgccagtgacctgggcgatggtttcatcaatgcgcgtatggacgccaagcgtcagaccataaccggaagcgttaatctgctcgatcagctctggtagctggttacggttgtaacgcaccacatgcagcaccggaccaaagacctctttttgcaattcggcaaagtcatccagttcgatcagcgtcggggcgacaaaggtgccgctttgccattcacgggcatcttcgctgttttcccgcaccgcctggaacaccggacggcctttgctacgcatggtctgaatatggcgctcaatattggctttcgcttcgctatcaatcactggaccgatatcggtggtcaggcgacccggattacccatccggcattcggccattgcgccgcgcagcattttcaacgtgtggtcggcaatctcatcttgcaggcacagcacgcgcagcgcgctacaacgctgacccgcactgtcgaacgcgctggccagtacatccacgacgacctgttcggtcagtgcactagaatcgacaatcatcgcgttcatgccgccggtttcagcgatgagcggaatagggcgaccctgagcgtccaggcggctggcgatattgcgctgcagtaacgtagcgacttcggtactaccggtaaacatcaccccgcgcacgcgatcatcacccgtcagttgcgcgcccacggtttcaccccgacctggcagcaattgcaccacgcctggcggtacacccgcttccagcaaaatggcgatcccttgcgcggcaatcagcggcgtttgttctgccggttttgccagcacgctgttacctgccgccagtgcggcggcgatctgcccggtgaaaatagccagcgggaagttccacggactgatacacaccacaggccctaatggacggtgggtttcgttagcgaaatcatcccgcacctgtccggcgtagtagtggagaaaatcgaccgcttcgcgcacttcggcaatggcgttactgaaggtttttccggcctcacgcaccagaataccaatcagttgctgcatctggctttccatcagcacggcagcgcggtgcaaaatcgctgcgcgttcagccggaggcgtggcaaaccagattggcgcgttattaaccgcactttccagcgcctgttctacttcacgcggcgtggcttcacgcacatagcccacaatatctttcggttccgcagggttaataacggggctcatctcacctgccgctaccggttgttccagcattggcaaggcctgccatttttgcagtgcactattgagcagggcagaggagaggctggccaggcggtgttcgttagcgagatccagccctgcgctgttgtcgcgcccgtgaccgtaaagatcgcgcggcaggggaattttcggatgcggtaatccagtttgcccttcctgttgcgccagtttttctacagcagtgaccggatcggcgaccagttcatccagtggcaaagaggtgtcggcaatacggttaacaaagctggtgttagcaccgttttccagcaggcgacgcaccagatacgccaacagcgtttcatgtgtgccaaccggagcataaatacgacacggacggttaagtttgccgtcggcaactttcccggggacctgctcatacagtggctcgcccataccatgcaggcactggaactcgtactgacccgggtagtagttctgccccgccagttgataaatcgccgccagcgtatgggcgttgtgcgtcgcgaactgcgggtagattagattcggcaccgccagcagctttttcgcacaggcgagataagaaacgtcggtatacaccttgcgggtataaaccggataaccttcaaggccgtccatctgcgcacgcttaatttcactatcccagtacgcgcctttcaccaggcgaatcatcagacggcgacggctgcgggtggcgagatcaatcaggtaatcgatcaccaacgggcagcgtttttgataagcctgaataacaaaaccgatgccgttccagcctgccagttccggctcgaaacagagtttttccagcagatcgagggagatctccaggcgatcggactcttcggcgtcaatgttgataccaatatcgtactgacgcgccagcagggtgagacttttcagacgcgggtaaagctcttccattacccggtcatactgggcgcggctataacgcggatgcagcgcgctcagtttgatactaatgcccggcccttcatagatgccacgaccgttagacgctttaccgatggcgtgaatcgcctgctgataggaaaccatatacgcctgtgcatctgcggcggtcagcgcggcttcgcccagcatatcgtaagagtaacggaaacctttctcttccagcttgcgggcattggctaacgcttccgcgatggtttcgccagtgacgaactgctcacccatcaggcgcatcgccatatccacacctttgcggatcagcggttcaccgcttttaccgataatgcggttcaggctgcgggagaggctggcttcgttatgggtggaaaccagtttgccagtaaacagcagcccccaggtggcggcattaacaaacagactcgggctacgaccaatgtgactctgccagttaccgttgctgattttgtcgcgaattaacgcgtcgcgggtggctttgtcgggaatacgcaacaacgcttccgccagacacatcagcgccacgccttcctggctactcaggctaaactcctgcaataacccctggaccatacctgcgcgaccactggcatttttttgattacgcagtttatcggccagctgatacgccagtttgtgcgcctgttcagcaactggctgcggcaggcgggcttgttccagcagcatagaaaccgcttcggtttccgggcggcgataggccgcggtgatcgcggcgcgggaaacgctctggggcaatatttgctcggcaaagtcgaggaatggctggtgtggttcctctgccggagtcggtgcttcatcgctctcattggccgcgccagaaagcagcgcaggtagctccggcagagtatcgctgttttccagttgttcgagataagaaaaaatcgcctgcttaattaaccagtgtggtgtgcgatcgatacgtgtcgcggcagacttaatacgctcacgcgtcgcgtcgtccagcttaacccccatggtggtggttcccatgccattactcctgttgttcagaaaggtgcaacttaacgttatcgtgaaatatccatgatgttgcaactttgtgcaaccatgttaaatgtgacatgcgtagcaagcttaaaaatgaatgaaatgttaataaaagaaatcgatatgacagggattaaaaaaataactcagactttttctctgcggcagttaacatttttgaaaggtgcaaccgcaaaaaatgtgagagagtgcaacctgatgaaaaatagtgtcgctgagcactaaaatttaatgtaaatggtgtgttaaatcgattgtgaataaccagcgcttccggcaggatacggtcgccctggtaaaacataaactctgttaccccgttccggtggcagatataacggcaagtttcgacattgccgataataattttttggagactttagatggctattagcacaccgatgttggtgacattttgtgtctatatctttggcatgatattgattgggtttatcgcctggcgaagtacgaaaaactttgacgactatattctgggcggtcgtagtcttgggccattcgtgacggcattaagcgcgggtgcgagcgatatgagcggctggctgttaatggggttgccgggcgctgtttttctttccgggatttccgaaagctggatcgccattggcctgacattaggcgcgtggattaactggaagctggtggccgggcggttgcgtgtgcataccgaatacaacaataacgccttaacactgccggattatttcaccgggcgctttgaagataaaagccgcattttgcgcattatctctgcgctggttattttgctgttcttcaccatttattgcgctagcggcattgtggcaggcgcgcgtctgtttgaaagtacctttggcatgagctacgaaacggctctgtgggcgggcgctgcggcgacgatcctttacacctttattggcggtttcctcgcggtgagctggactgacactgtacaggccagcctgatgatttttgccctgatcctgacgccggttatcgtcattatcagtgtcggtggctttggtgacagcctggaagtgatcaaacaaaagagcatcgaaaacgttgatatgctcaaaggtctgaactttgttgccattatcagtctgatgggttgggggctgggttacttcgggcagccgcacattctggcgcgttttatggcggcggattctcaccacagcattgtccatgcgcgtcgtattagtatgacctggatgatcctctgcctggcaggggcggtggctgtcggcttctttgggattgcttactttaacgatcatccggcgttggctggtgcggtaaatcagaacgccgagcgtgtgtttatcgaactggcgcaaattctgtttaacccgtggattgccgggattctgctgagcgcaattctggcggcggtaatgagtaccttaagttgccagctgctggtgtgctccagtgcgattaccgaagatttgtacaaagcgtttctgcgtaaacatgccagccagaaagagctggtgtgggtagggcgtgtgatggtgctggtggtggcgctggtggcgattgcgctggcggcaaacccggaaaaccgcgtgctgggcttagtgagctacgcgtgggcaggctttggcgcggcgtttggtccagtggtgctgttcagcgtgatgtggagtcgcatgacgcgtaacggtgcgctggcggggatgatcatcggtgcgctgacggttatcgtctggaaacagttcggctggctgggactgtacgaaattattccgggctttatcttcggcagtattgggattgtagtgtttagtttgctgggtaaagcgccgagtgcggcgatgcaaaaacgctttgccgaggccgatgcgcactatcatagcgctccgccgagtcggttgcaggaaagctaagggacttagcctgcggcggttttgtttggcttcagcagcgggttgcgctcccttaatgtgcctcgccatataaattgaatggtgcagggagcgcgcagggggcggccaatcgccgccgccccctgctgtcccggccttcggggaacgcttcagcgattttgacgccaccaacacccgagctgttattatgttccgggcaaaaagttagatttgataatcgcggatggacgaaattgcttgatacacccgcttatcagttttacatggaagctctgatgcattgagtctggacagttttgtcggctggatacggcgtttacgcggcatccggcaagaacacatggttctttgcaaacaatcccatctttctaccctggaataatcgtttatatcccttggcattacctctctttgtttacattccaacatcattttataaacattccgcttgtgtttttctttgccgtaatgataatcgctatcactgcgatttacttttctttgcatagattgactcagaaaaacgtttaagggtgggtggcatgtttgttccgtttctcattatgttgcgcgaaggacttgaagccgcgctgattgtcagtttgattgccagctatcttaagcgtacccagcgaggccgatggattgtgtgatgtggattggcgtgttgcttgccgctgcgttgtgcctgggcttgggtatcttcattaacgaaaccaccggcgaatttccgcaaaaagaacaggaactgtttgaaggtatcgtggcggtgatcgccgtggtgatccttacctggatggttttctggatgcgcaaagtgtcgcgcaacgtcaaagtgcaactggaacaggcagtcgatagcgcattgcagcgtggaaatcatcatggctgggcgctggtgatgatggtcttttttgccgttgcaagggaagggctggagtcggtctttttcctgctggcggcatttcaacaagatgtcgggatctggccgccgctgggtgcaatgctcggtcttgctactgccgtggtgctaggcttcctgctctactggggcggtattcgcctcaatcttggtgcattttttaaatggaccagcctgtttattctcttcgtcgccgcagggctggcagctggtgccattcgcgcatttcatgaagccggattgtggaaccactttcaggaaatcgccttcgatatgagtgcggtgctctcaactcactcgctgtttggcacgctgatggaagggatttttggctatcaggaagcgccgagcgtcagcgaagtcgccgtctggtttatttatctcatcccggcgctggtggcatttgctctgccaccacgcgcaggggcgacagcgtctcgctccgcgtaacaaatacgacgcaaactcttgcttagttacaacatactttaaagggatagtctcgtcatgaccattaacttccgccgtaacgcattgcagttgagcgtggctgcgctgttttcttctgcttttatggctaacgccgctgatgtgccgcaggtcaaagtgaccgtgacggataagcagtgcgaaccgatgaccattacggttaacgccgggaaaacacagttcattattcagaaccacagccagaaggcgctggagtgggagatcctcaaaggcgtgatggtggtggaagagcgggaaaatatcgcccctggctttagccagaaaatgacggcgaatttacagcctggcgaatacgatatgacctgcggtctgctgactaacccgaaagggaagttgatcgtcaaaggtgaggcaacggcggatgcggcgcaaagtgatgcgctgttaagtcttggtggtgcaattactgcatataaagcgtatgtcatggcggaaaccacgcagctggtgaccgacaccaaagcctttaccgacgcgattaaagcaggcgatatcgaaaaagcgaaagcactgtatgcaccgacgcgccagcactatgagcgtattgaaccgattgctgaactgttctccgatctggatggcagcattgacgcccgtgaagatgattacgagcaaaaagccgccgacccaaaattcactggtttccaccgtctggaaaaagcattgtttggcgacaacaccaccaaagggatggaacagtacgctgagcagctttataccgatgtggtcgatttgcaaaaacgcatcagtgaactggctttcccacctagtaaagtggtcggcggcgcagccggactgattgaggaagtggcagccagcaaaattagcggtgaagaagatcgctacagccacaccgatctgtgggatttccaggctaacgttgaaggcagccagaaaattgtcgatttgctgcgtccacaactgcaaaaagccaacccggaactgctggcaaaagtcgatgccaactttaaaaaggtcgataccattctggcgaaataccgtactaaagacggttttgaaacctacgacaaattgaccgatgccgaccggaatgcactgaaaggaccgattactgcgctggcggaagatctggcgcaacttcgcggtgtgctgggactggattaagcgttatgcagtataaagatgaaaacggcgtgaatgaaccgagtcgccgacgtttactgaaagtgataggtgcactggcgctggcgggaagttgtccggtcgctcatgcacaaaaaacgcaaagtgcgccgggtacgcttagtccggatgctcgcaatgagaaacagccgttttatggtgagcatcaggcagggatcctgacgccacaacaggccgcaatgatgctggtggcgtttgatgtgcttgccagcgataaagccgatcttgagcggttgtttcgcttgttgactcagcgttttgcttttctgactcagggcggagcagcaccagaaacgccaaatccgcgcctgccaccactcgattccggcattcttggcggctacattgcgcccgataatctcaccatcacgttaagcgtgggtcacagtttgtttgatgagcgctttggccttgcgccacagatgccaaaaaagctgcagaagatgacgcgtttccccaacgacagcctggatgcggcgttatgtcatggtgatgtgttgctacagatttgcgccaacacccaggacacggttatccatgcgctgcgcgatatcatcaaacacacgccggatttgctcagtgtgcgctggaagcgggaagggtttatttccgatcacgcggcgcgtagtaaaggcaaagagacgccgattaatttgctgggtttcaaagacggcactgccaatcccgatagccagaatgataagttgatgcaaaaagtggtgtgggtaacggcagatcagcaggagcctgcgtggacaatcggtggcagctatcaggcagtacgcttgattcagtttcgagtggaattttgggacagaacgccgctgaaagaacagcagacgatttttggccgtgataagcaaaccggtgcgccgctgggaatgcagcatgagcatgatgtgcctgattacgccagcgacccggaagggaaggtgatcgcgctggacagccatatccggctggcgaatccccgcacggcggagagtgagtccagcctgatgctgcgtcgtggctacagttatagtctgggcgtcaccaactccgggcaactggatatggggttgctgtttgtctgctaccaacacgatctggaaaaaggcttcctgacagtacaaaaaaggctcaatggcgaagcgctggaggaatacgttaaacctatcggcggcggttatttttttgcgctgccgggggtgaaggacgcgaacgattatttcggaagcgcgttattgcgggtttaatgtttttaggcggataaggcatttgtgcgcagatgcctgatgcgacgcttgcgcgtcttatcatgcctacaatcagtgcgggtttggtaggctggataaggcgttcacgccgcatccggcgatcgtgcactgatgcctgatgcaaatcctgctgaaagcacacagcttttttcatcactgtcatcactctgtcatctttccagtagaaactaatgtcactgaaatggtgttttatagttaaatataagtaaatatattgttgcaataaatgcgagatctgttgtacttattaagtagcagcggaagttcccggcagtgatagtcagtcactatggagatcgcggatggtaacgtcctgtactggacatgttttagataatcaacgcgccaccactcgcggagttttctcctccggtagtcatctcgtcactttgcattttcaacctcatcctttctttagttgtgttaccgacgccgtaaacggtgcgcgtagccgttttagcgcattttatccaaaagcaaactatggcttacaaggaagccaaccctctgatgttcgtgcgcataatcgcgctgccaacggcgcgtgtgatgaatacaaacaactcaaggtgctctccatgggaagacaaaagcagtgatcaaagctcgtcgcgaggcaaaacgtgtgctgagacgggatagccgcagccataagcagcgtgaagaagaaagcgtcaccagccttgtgcagatgggcggcgtagaagccattggtatggcccgcgacagtcgcgatactagccccatcctcgcgcgaaatgaagcgcaattgcactatctgaaggctattgagagtaagcagctgatattcgccacgggcgaagccgggtgcggaaaaacctggatcagcgcagcaaaagcggcagaggccctgatacataaggatgtcgacaggattatcgtcacccgtccagttctgcaagccgatgaagatcttggcttcttacctggagatatcgcagaaaagtttgctccctattttcgcccggtctacgacgtgctggtccggcgcttaggggcttcctttatgcagtactgcctgcgaccggaaatagggaaggtggaaattgcgccgttcgcctatatgcgtggacgtacctttgaaaatgcagtcgtcattcttgacgaggcgcagaatgtgactgccgcgcaaatgaaaatgtttttaacccgcctcggggagaacgtgacggttatcgtcaacggtgatatcacgcaatgcgatttgcctcgcggcgtgtgctccggattaagtgacgcgctggaacgtttcgaagaagatgaaatggttgggatcgtccggttcggtaaagaggactgcgtacgtagcgcactttgccaacgtacgctgcatgcctacagttaagtgtgttatcggtgcagagcccgggcgaaccgggctttgttttgggtgttcccggtgtgtgcaatatacgaaaaaaaagcccgtactttcgtacgagctcttctttaaatatggcggtgagggggggattgactcgcttcgctcgccctgcgggcagcccgctcactgcgttcacggtctgtccaactggctgtcgccagttgtcgaaccccggtcggggcttctcatccccccggtgtgtgcaatatacgaaaaaaaagcccgtactttcgtacgagctcttctttaaatatggcggtgagggggggattcgaacccccgatacgttgccgtatacacactttccaggcgtgctccttcagccactcggacacctcaccaaattgtcgttcctgtcttgctggaacgggcgctaatttagggaaatcatgacctgaggtcaacaaactttttgaaaaaatcgcgcgtttattcaaacttcaatcaatgtgtggttttaataagcgaaatctgctttttttgccaccgaccacggatttgttatgctggtggcctttgtagatcataacgataagtgcgaataaatttcgcacaacgcttttcgggagtcagtatggatatcatcttttatcacccaacgttcgatacccaatggtggattgaggcactgcgcaaagctattcctcaggcaagagtcagagcatggaaaagcggagataatgactctgctgattatgctttagtctggcatcctcctgttgaaatgctggcagggcgcgatcttaaagcggtgttcgcactcggggccggtgttgattctattttgagcaagctacaggcacaccctgaaatgctgaacccttctgttccactttttcgcctggaagataccggtatgggcgagcaaatgcaggaatatgctgtcagtcaggtgctgcattggtttcgacgttttgacgattatcgcatccagcaaaatagtagccattggcaaccgctgcctgaatatcatcgggaagattttaccatcggcattttgggcgcaggcgtactgggcagtaaagttgctcagagtctgcaaacctggcgctttccgctgcgttgctggagtcgaacccgtaaaagctggcctggcgtgcaaagctttgccggacgggaagaactgtctgcatttctgagccaatgtcgggtattgattaatttgttaccgaatacccctgaaaccgtcggcattattaatcaacaattactcgaaaaattaccggatggcgcgtatctcctcaacctggcgcgtggtgttcatgttgtggaagatgacctgctcgcggcgctggatagcggcaaagttaaaggcgcaatgttggatgtttttaatcgtgaacccttaccgcctgaaagtccgctctggcaacatccacgcgtgacgataacaccacatgtcgccgcgattacccgtcccgctgaagctgtggagtacatttctcgcaccattgcccagctcgaaaaaggggagagggtctgcgggcaagtcgaccgcgcacgcggctactaataaagcatcaggattcctgctatccttggcgggaattgaatacaggagagagttatgtatcccgtcgaccttcatatgcataccgttgccagcacacatgcatatagcacattaagtgattacattgcccaggccaaacaaaagggcattaaactttttgcgatcaccgatcatggcccggatatggaagatgcgccgcatcactggcacttcattaacatgcgtatctggccgcgagtggttgatggggtagggatcctgcgcggcatcgaagctaacattaaaaatgttgatggtgaaattgactgcagcggtaaaatgtttgacagcctggatctaattattgccggttttcatgagccggtttttgcgccacatgataaagcgaccaatacacaagcgatgatcgccactatcgccagcggcaatgtgcatataataagccatcccggaaatcccaaatatgaaatagatgtgaaagccgttgctgaagcagccgcgaaacatcaggtggcgctggaaatcaataattccagttttttacacagtcgtaagggcagtgaagacaactgtcgtgaggtagccgcagcggtacgtgatgctggaggttgggtggcattaggcagcgattctcacaccgcgtttaccatgggggaatttgaagagtgtcttaaaatcctcgacgcggtagattttccgccagagcgcattttgaatgtttctccgcgccgcttactgaacttccttgaatctcgcggtatggcaccgattgcggaatttgcagacctttaattactagtaatggaaatatattaatgaacgagttttctatcctctgtcgtgtgctgggtagcctctattaccgccaaccacaagatcctttactggtgccgctgtttaccctgattcgtgaggggaaactggctgcgaactggccactggagcaggatgagttgctgacacgtttgcagaaaagctgtgatatgacgcaagtctctgccgattacaatgcgttgtttatcggcgatgaatgtgctgtgccgccatatcgtagcgcatgggttgagggcgcgacggaagcggaagtgcgcgcttttctttctgagcgagggatgccattagcggatacgccagccgatcacatcggcacattgctgctcgcagcttcctggctggaagatcagagtacggaagatgagagcgaagcactggaaacactgttcagtgagtatctgttaccctggtgtggtgcgttccttggcaaagtggaggcccatgcaaccacgcctttctggcgcaccatggcaccgctaacccgcgatgccattagtgcaatgtgggacgagctggaagaagattctgaagaataagtgtgatctacgtcactcataactgcaacggataatttgttgttgcataaaatgtgtgctcgatctcattcatggccgcgttttctgctatcatgcgcggcatgaacatacttctctctattgcaatcacaacaggcattctctccggtatctggggatgggtggctgtttccctgggcttactaagctgggcgggcttcctgggctgtacggcctactttgcctgcccgcaaggtgggctgaaagggctggcgatctccgctgcaaccctgcttagtggcgtggtgtgggcgatggtcattatttacggtagtgcactggcaccacatctggaaattctcggttatgtcataaccggtattgtcgcgtttctgatgtgtattcaggccaaacagctgctgcttagttttgttccggggacgtttataggcgcatgcgcgacgtttgccgggcagggtgactggaaactggtgttacctagcctggcgcttgggctgatatttggttacgcaatgaaaaacagtggcctgtggctggcggcgcgtagtgcaaagacggcgcaccgtgagcaggaaatcaaaaataaagcgtgaggggcactcacgctttcgcttaaacagtaaaatgccggatgataattccggcttttttatctgtcaggattccggtggaacgctcatatggcggtatttcaccagaatgtcattctgccgttctgctttattttgcaaatcccacagaccacggtcgataccatcattaatcaggaaaatgacccctgtttcgatagcgctcatcaggcacagcataacaggttcgttgctggtgtaacccacttccccttcaagcaagcgctggtagtcaataaagcggaaaaccccggcctgaacttcataggaaagtatcgtcttactggtgttcacgctagaaaggatctcgccggtactcacattgacgacgcgcaggttcacggcaatctgatcgagctggtattgcgtgtcggcaccgatgccaaaatatcttgccccaaccccgccagatttgacgttgctttcataaccgataatgctaccttcaaccatgatatttgccgccgttaaagattgcagcgggattcggttattaatggcaaccgtgccgttttcttgtgccgcacgaataatcttgcgctcgttaagcaggttttgtaagccctggcgctccagcggtataaaccagcgagaatctttcagtgccgtgaccagcattgccgtggcgctttgcggaacagcagtggagaagttacttgccgggtagggtttaaattgcccggtttcgtcctgaatgttgtatacgctaacaaagattttacccgtcggcgctggcagatgggtcaaatctttgtagctctgagcacgaggcattaatgtcggtctggcggcttctttaggcggggcggttaagcatccgctcagtaacatgacggcaaccaaaagaaataagcgctgcatgattattttccttatgaagctggggcttaaaaatcggtactgttattttgtaaaccgctaacctggatggtgctggtttgtccggttttacgatctgtcacgttcaactgcaattgaccatcgcggttggcaatatcgacaatataatcgttggtcaccatgcggcccggtttaccggtattaatattgctcagtagcccacctaaaatttgactctggatggcctgagtaaagttatctaacgcactgggtgtttcaataccaaagtcatcgttatagctcggatctttataagagttttgggcctgagcgctatttaataaaaaagcgccattatttgggttaccaccaaagtttggattacggaactggaaagtcatggttccagcccaacttaatgggctaataagcatgagtagaactactgcatgtttgacacgcattgcagcctccgaacaattttttatttagaattcatcatgcgccaaatcgcccgtacttaataacgcctgatttatctggcgacgatttagtgcttcttcagtttgaatcagtgcaaagacgacagttttctcgaagtctcttttcaacggaaataaaaaagtctggaaaataacgtcctgattgaccgttatagtgatccagcttccccatcgtgcactgggcctttcattaatcgttaagttacccgtatagtcactttcccatttatcactaaaggctcggtaaaaatcatggccaatagaactaacagtatggtcagttagcaatcccgggacttctacctcaacggcgtgaagattccctgcggcgaacagaaattctgccgccacaatccagcgtaaataacgtttcatggctttatcgcctgaggttatcgtttgcccaggaaaccgcttgtgtccggttttttacggctatcttcttgaaaagattataaagatgcgttttaaccgtattttcgctgatgaacaagctacgagcgatctcgttattagacgcgccgatacgcagcttattcaggatctctttttcccgatgagtaaggagggcactttccgtgctgttataacgatagttaccactatgcgtaatcaggtagctggcaagcttttgcgtaaagtagcattcgccgcgcaggacgccttgcaacccattgacaacacgttcttgatcctccatggaataaaaaacgccgttgatatgaggccagttttcaatgtcgcggtacgggtaatcttcaggcgtatttagcaacaatattttgatattgttgtttttcctgctcaaagtatcctgccaataatggataagctttttatccgcttccatcatatccagaagaataatagagccactagagatatcgtccagagaacgttgaatattatgtaattttcctgtaattgccaggctttgtttaaggtgctgcaagagagctgtcgcctgcaaagaagatttagtgatcaacaataatgtatgaccatgaatactatggacttcattaaacatgatgaaaccccgctttttttattgatcgcacacctgacagctgcctctaaaatagaagcaccagaagtactgacagatgttgcactgctgtgtgtagtaataaatcagccctaaatgggtaaaatataaaactaatggattacatctgatttcaatctagccattacaaatcttaaatcaagtgttaaacatgtaactaaatgtaactcgttatattaaaatgttaaccttaaggttttattaagtttagaaatgatagaaaagttgtacatttggtttttattgcacaattttaaaaaatcatacaaatggtgataacttactaataatgcatataaaaaatatttcggtgtagtcctttcgtcatgtaaaacgttcttgttttttctccacacctccgtggacaattttttactgcaaaaagacgaggtttgtcacggcttgtgcgcaagacatatcgcagcaatcagcgacgggcaagaagaatgactgtctggtgctttttgatagcggaaaacggagatttaaaagaaaacaaaatatttttttgcgtagataacagcgtatttacgtgggttttaatactttggtatgaactaaaaaagaaaaatacaacgcgcgggtgagttattaaaaatatttccgcagacatactttccatcgtaacgcagcgttaacaaaatacaggttgcgttaacaaccaagttgaaatgatttaatttcttaaatgtacgaccaggtccagggtgacaacatgaaaaacaaattgttatttatgatgttaacaatactgggtgcgcctgggattgcagccgcagcaggttatgatttagctaatagtgaatataacttcgcggtaaatgaattgagtaagtctagttttaatcaggcagccataattggtcaagctgggactaataatagtgctcagttacggcagggaggcagtaaacttttggcggttgttgcgcaagaaggtagtagcaaccgggcaaagattgaccagacaggagattataaccttgcatatattgatcaggcgggcagtgccaacgatgccagtattagccaaggtgcttatggtaatactgcgatgattatccagaaaggttctggtaataaagcaaatattacacagtatggtactcaaaaaacggcaattgtagtgcagagacagagccaaatggctattcgcgtgacacaacgttaatttccattcgacttttaaatcaatccgatgggggttttacatgaaacttttaaaagtagcagcaattgcagcaatcgtattctccggtagcgctctggcaggtgttgttcctcagtacggcggcggcggtaaccacggtggtggcggtaataatagcggcccaaattctgagctgaacatttaccagtacggtggcggtaactctgcacttgctctgcaaactgatgcccgtaactctgacttgactattacccagcatggcggcggtaatggtgcagatgttggtcagggcagtgatgacagcagtatcgatctgacccaacgtggcttcggtaacagcgctactcttgatcagtggaacggcaaaaattctgaaatgacggttaaacagttcggtggtggcaacggtgctgcagttgaccagactgcatctaactcctccgtcaacgtgactcaggttggctttggtaacaacgcgaccgctcatcagtactaatacatcatttgtattacagaaacagggcgcaagccctgttttttttcgggagaagaatatgaatacgttattactccttgcggcactttccagtcagataacctttaatacgacccagcaaggggatgtgtataccattattcctgaagtcactcttactcaatcttgtctgtgcagagtacaaatattgtccctgcgcgaaggcagtagtgggcaaagtcagacgaagcaagaaaagacccttagtttgcctgctaatcaacccattgctttgacgaagttgagtttaaatatttccccggacgatcgggtgaaaatagttgttactgtttctgatggacagagtcttcatttaagtcaacaatggccgccctctagtgaaaagtcttaatttgttgaaatatcgagcataagatgaatctggagagaatggtctgctgcgaatcagccaacctgaaagtatggataacacaaccctcaaggatgactaatcattgaggaaatagaataaatgttcagaccttttttaaactctcttatgctcggcagtttgttttttccttttattgccattgctggaagcaccgtgcaagggggcgtgatccatttttatggccaaattgtggaaccggcatgtgacgtcagcacccagagtagtcccgtagaaatgaactgcccacagaatggttctattccgggcaaaacctactccagcaaagcgttaatgagcggcaatgtcaaaaacgcgcaaatagccagtgtaaaagtgcagtatcttgataaacagaaaaagctggctgtaatgaacatcgaatataactaagtttctgaacaactcacgttgctgagcagaaaaatgcgatttaaccaaaaagcctgctgtacacttaagaaacaagaaggtgtaaggaggcgttatgaaaacgcgtattcatgttgtgcagggtgatattaccaaactggccgttgatgtgattgtgaatgcggctaatccgagtttaatgggaggcggcggcgtcgatggggccattcatcgcgcagcgggtccggccctgctggatgcttgtttaaaagtcaggcaacagcagggcgattgccctacggggcatgccgttattacgcttgcaggcgatcttcccgctaaagccgtagtgcacaccgtcgggccagtctggcgtggtggtgaacaaaacgaagaccagcttttgcaggatgcctatctcaatagcctacgactggtggcggcaaacagctatacgagtgtggcttttcctgcaatcagtactggggtttatggttaccctcgtgcggcagcggctgaaatcgcagtaaaaaccgttagtgaatttattacccgtcacgctttacccgaacaggtatactttgtctgttatgatgaagaaaacgcccacctctacgaaagactccttacccaacaaggagatgaatgatttgccccggctggcgagcgcggtgctgccactgtgtagccaacatcccggtcagtgtggcctttttcctctggagaaaagtctggatgcgtttgccgcccggtatcgtctggccgaaatggcagagcatacgctcgatgttcagtattacatctggcaggacgatatgagcggtcggttactgttttccgccctgttagccgcagcaaagcgtggcgttcgcgtccgtttgttgctggacgacaacaatacgcccggacttgacgacattttacgcttgcttgacagtcatccacgcattgaagtccggctttttaatcctttcagctttcgcttgctgcgtccgcttggttatatcaccgacttttcccgtcttaatcgccgtatgcacaataaaagtttcactgtcgatggcgtggtgaccctggtgggaggacgaaatattggtgatgcctattttggagcaggggaggagccactttttagcgatttagatgtcatggcaataggacccgtggtagaggacgttgccgatgatttcgcccgctactggtattgcaaaagcgttagtcccttacagcaggtgctggatgtcccggagggtgaaatggcggatcgcatcgagttacccgcctcctggcataacgatgccatgacgcatcgttatttacgcaaaatggaatccagtccatttataaatcatctggttgatggaacattgccgcttatctgggcgaagacacgtttattaagtgatgatccggcgaaaggggagggcaaggcaaaacggcatagtctgttaccgcagcgcctgttcgatatcatgggcagtcccagtgaacgcatcgatattatctcttcctattttgtaccgacacgcgcaggtgtggcgcaactcttacggatggtgagaaaaggggtaaagattgcgatcctaaccaattctcttgccgctaacgatgttgctgtcgtccatgccggatacgcgcgctggcgcaaaaaattgctccgctatggcgtggaattatatgaactcaagccgacgcgtgaacaaagtagtacgttacacgatcgcggcataaccggtaattccggagccagcctgcatgctaaaacctttagcatcgatggtaaaacggtgtttatcggctctttcaatttcgatccgcgtagtacattgctcaatactgaaatgggcttcgtgatagagagcgaaacgctggcacagttaattgataaacgctttattcagagccagtatgatgcggcctggcagctccgtctggacaggtggggacggatcaactgggttgatcgtcatgcaaagaaagagattattctcaaaaaagaacccgccaccagtttctggaagcgggttatggtcagactggcgagcatattgcccgtggaatggttattgtaaatgtggcttaacgggctggtgctttatcgttctcacgcttaacaaccggtttaccagagaacaaaaacttcagtaacgggatgcgcaaatgaatttcatacagaattatcgcaatccctactacaaatatcaggccacagagaaaaccaagccagttggaggtgatgtgcggtgtaatgtatgcgccgaaaaacagcgttaacgggtggtgaaccagatagataaacaggcttgcgttaacaaaataagtcacccgcgcactctggaagttaagcaaacggtggccaaaggagaagaccacattcaccatccacagaccgaggaccatggtgatcacgctctcggtttcgtacatccaggcatcgccactgccatagcgctggttgagtaaataagcgacaaacgccaatgctgctgcaagggtacagccacgagacggcgtggtaaacaaggctttaagatgagggaaaatgaaagccagtgcgccgaggataaagaacggcaaataaaacagcgtttgcatgacaataaaattgaacatgccattactcagaatgggcggatacacaataaaaatcgttcttcttattaccgcataaccgatgccgaggcataaaaaaatcacgcttagttttaccatgctgaattttttattcgttttatcagaattttctaaattatttctgatgcgcttaaatatccatacgcacagcgtcgtcatgaccactaacaccagtaaaaaccacaggtgacttattaattcccaggccaacgtattatatttgtcatacaaactcagcccaggccaactttccgcttttcctttgacatattgcagcataataaattgcggtaatgtcagtagggggatggctgttaacatcgggatacctacacgttcgacacgtactttccaccattttttcaagggatagcgtaaaaaaagcatgtaggaaaagtagccggatataacgaaaaatacctgcatgcggaagctgtggatgaagtcattaaaaagggtcagccacaaactactttcggcgctattcacatgccatgtatggctgctatagattaaagaaatatgaaaaggtatccctaacaacatcagccaggcgcggatggagtcgaggaaatattcacgttgcgcgggtactgggttcatatatggttaactaatctcggatttttcgtcttatccctgtcgggttatgcctttaggcttgttgccatagtgacaccgacctgaccgcgccaggcgcaggcttcaaggtttttatgcatagcatcatcgctaccactaaccagaatggaagcgtctgtaagacggttgataaataaatttgctggcaaaccctacacgaagtcgatgcttctgtctttaggagaagcacggaaagtgaaaacggttgcaatcaggtgcttaatccatgagccagcgtgctgaacgataccgggattctgttgtcggaatggctggttatccattaaaatagatcggatcgatataagcacacaaagggggaagtgcttactaattatgaaacataaactacaaatgatgaaaatgcgttggttgagtgctgcagtaatgttaaccctgtatacatctagtagctgggctttcagtattgatgatgtcgcaaagcaagctcaatctttagccgggaaaggctacgagacgcccaaaagcaacttgccctccgttttccgcgatatgaaatacgcggactatcagcagatccagtttaatcatgacaaagcgtactggaacaatctgaagaccccattcaaactcgagttctaccatcagggtatgtacttcgataccccggtcaaaataaatgaagtgactgccaccgcagtcaaacgaatcaaatacagcccggattatttcactttcggcgatgttcagcatgacaaagatacggtaaaagaccttggctttgccggttttaaagtgctttacccgatcaacagcaaagataaaaacgatgaaatcgtcagcatgctcggggccagctatttccgcgtgattggtgcaggtcaggtttatggcctttctgcccgcggcctggcaattgataccgccttgccaagcggtgaagaatttccgcgcttcaaagagttctggatcgagcgtccaaaaccgactgataaacgtttaaccatctatgcattgcttgacagcccgcgtgcgacaggtgcttacaaattcgtggttatgccagggcgtgacacggttgtggatgtgcagagcaaaatctatctgcgcgataaagtcggcaaactgggggttgcaccgttaaccagtatgttcctgtttgggccgaaccaaccgagccctgcaaataactatcgtccggagttgcacgactctaacggtctctctatccatgccggtaatggcgaatggatctggcgtccgttgaataacccgaaacatttagcggtcagcagcttctccatggaaaacccgcaaggctttggtctgttgcagcgcggtcgtgatttctcccgctttgaagatctcgatgatcgttacgatctccgtccaagcgcatgggtgactccgaaaggggagtggggtaaaggcagcgttgagctggtggaaattccaaccaacgatgaaaccaacgataacatcgtcgcttactggacgccggatcagctgccggagccgggtaaagagatgaactttaaatacaccatcaccttcagccgtgatgaagacaaactgcatgcgccagataacgcatgggtgcaacaaacgcgtcgtagtacgggggatgtgaagcagagcaacctgattcgccagcctgacggtactatcgcctttgtggtcgattttaccggcgcagagatgaaaaaactgccagaggataccccggtcacagcgcaaaccagcattggtgataatggtgagatagttgaaagcacggtgcgctataacccggttaccaaaggctggcgtctggtgatgcgtgtgaaagtgaaagatgccaagaaaaccactgaaatgcgtgctgcgctggtgaatgccgatcagacgttgagtgaaacctggagctaccagttacctgccaatgaataagacaactgagtacattgccgaagactgatatccgcgccgttcatcaggcgctggatgccgaacaccgcacctgggcgcgggaggatgattccccgcaaggctcggtaaaggcgcgtctggaacaagcctggccagattcacttgctgatggacagttaattaaagacgacgaagggcgcgatcagctgaaggcgatgccagaagcaaaacgctcctcgatgtttcccgacccgtggcgtaccaacccggtaggccgtttctgggatcgcctgcgtggacgcgatgtcacgccgcgctatctggctcgtttgaccaaagaagagcaggagagcgagcaaaagtggcgtaccgtcggtaccatccgccgttacattctgttgatcctgacgctcgcgcaaactgtcgtcgcgacctggtatatgaagaccattcttccttatcagggttgggcgctgattaatcctatggatatggttggtcaggatttgtgggtttcctttatgcagcttctgccttatatgctgcaaaccggtatcctgatcctctttgcggtactgttctgttgggtgtccgccggattctggacggcgttaatgggcttcctgcaactgcttattggtcgcgataaatacagtatatctgcgtcaacagttggcgatgaaccattaaacccggagcatcgcacggcgttgatcatgcctatctgtaacgaagacgtgaaccgtgtttttgctggcctgcgtgcaacgtgggaatcagtaaaagccaccgggaatgccaaacactttgatgtctacattcttagtgacagttataacccggatatctgcgtcgcagagcaaaaagcctggatggagcttatcgctgaagtcggtggcgaaggtcagattttctatcgccgccgccgtcgccgcgtgaagcgtaaaagcggtaatatcgatgacttctgccgtcgctggggcagccagtacagctacatggtggtgctggatgctgactcggtaatgaccggtgattgtttgtgcgggctggtgcgcctgatggaagccaacccgaacgccgggatcattcagtcgtcgccgaaagcgtccggtatggatacgctgtatgcgcgctgtcagcagttcgcgacccgcgtgtatgggccactgtttacagccggtttgcacttctggcaacttggcgagtcgcactactggggacataacgcgattatccgcgtgaaaccgtttatcgagcactgcgcactggctccgctgccgggcgaaggttcctttgccggttcaatcctgtcacatgacttcgtggaagcggcgttgatgcgccgtgcaggttggggggtctggattgcttacgatctcccgggttcttatgaagaattgccgcctaacttgcttgatgagctaaaacgtgaccgccgatggtgccacggtaacctgatgaacttccgtctgttcctggtgaagggtatgcacccggttcaccgtgcggtgttcctgacgggcgtgatgtcttatctctccgctccgctgtggtttatgttcctcgcgctctctactgcattgcaggtagtgcatgcgttgaccgaaccgcaatacttcctgcaaccacggcagttgttcccagtgtggccgcagtggcgtcctgagctggcgattgcactttttgcttcgaccatggtgctgttgttcctgccgaagttattgagcattttgcttatctggtgcaaaggaacgaaagaatacggcggcttctggcgcgttacattatcgttgctgctggaagtgcttttttccgtgctgctggctccggtacgcatgctgttccatacggtcttcgttgtcagcgcgttccttggctgggaagtggtgtggaattcaccgcagcgtgatgatgactccacttcctggggtgaagcgttcaaacgccacggctcacagctgctgttagggttagtgtgggctgttgggatggcgtggctggatctgcgtttcctgttctggctggcaccgattgtcttctcgttgatcctgtcaccgtttgtttcggtgatttccagccgtgccaccgttggtctgcgcaccaaacgctggaaactgttcctgatcccggaagagtattcgccgccgcaggtgctggttgataccgatcggttccttgagatgaatcgtcaacgctcccttgatgatggctttatgcacgcagtgtttaacccgtcatttaacgctctggcaaccgcaatggcgaccgcgcgtcaccgcgccagtaaggtgctggaaatcgcccgtgaccgccacgttgaacaggcgctgaacgagacgccagagaagctgaatcgcgatcgtcgcctggtgctgctaagcgatccggtgacgatggcccgtctgcatttccgtgtctggaattccccggagagatattcttcatgggtgagttattacgaagggataaagctcaatccactggcattgcgtaaaccggatgcggcttcgcaataaaaacgtagttgcctgatgcgctacgcttatcaggcctacatcgttcctgcaatttattgattttgcaagactttgtgggtcggataaggcgttcacgccgcatccggcaaaaacaacgagccaataaaaataccggcgttatgccggtatttttttacgaaagaggtatcaaatgcgtttaattgtggtgagcatcatggtgaccttgctgagtggctgtggcagcattattagtcgcactataccggggcaggggcatggcaaccaatattatcccggtgtgcaatgggatgtgcgtgactccgcctggcgttatgtcacgatccttgatctgccattctctctggtttttgatactttactgctgccgatcgacattcatcatggcccgtatgagtgattaacgttcatcccactcatcagctgctgcgcgtccttcctcggtatccagcggtggctcaagctgaaattccccctcgtcccattcatgtaatgtattctcttcctgccactcctggcgtatctctatctcatcatagtcgccatcaaaaacactttgcgcggcttcaccgctaagcataggtaaacattcaccttcttccccttcgtcggcaaaaaactcaacttgccacatgatgtcgccgtcctgcaaaacgtatttttgggcattgaactgttgcacattcgcatcttcggcgtcgatgccggggttgtctgcaagaaattcttcgcgtgcagcgtcaatggcttcttcaagcgttgcgtacatggtcatcacgattctccctttgagttgatgaggtttcagggaaaaggatagctgattctccgcttttgcaagtatgaaaggcgaaaaatcagttgcttacctggggtattcgacgacgacgtagactgttccaactatagactgcgttgaataacactacgccagcggtgacgagaaataccgctctgaaaccgtagttcgcactaatcgctgctcccatcaatggtccggtaacgttgccaatatcacgaaagctttggttatagctgaagatacgcccggcgatctggttgctgctgttgtaaaccaacagtgtctgtacggcggggagtagtgcaccatcggcggcaccgagcaaaaaacgtaaaatcccaagttgcaatggcgtctgaacgtaagacattgggatcaacagcagtacagaaaagatcagcgctgtaatcaggatcttttcgggtccgattcgatcgccaagtttgccgagtcgtggtgcacttagcagagccgccacgcctggcacgctggcgatcatgccactgataaaggcgacgttactgacgttacccgccagttcgcggacatacagcgtcagaatgggggcaatactgcccgtcgccacctggatgattaacgtagtgacaaacaggctgagtaccagtttcgggtttttaagacttgtcaccacttcccgcatgtgcagcatctcttttttgctgaccggctggaatttttctctgatgcaaaacagggtgacgaaaaagcagagtatgagcacactggcggtaataaagaataccggacgtaagccgtagctatcggcgagcaggccgccagccattgggccgagcaacgcaccactaacgccgcctgtggagagcgtacccagcgcccagccgcttttattacgcggtacttgtgtggcgataagagcattagcgttggggacaaatccgccaagtaacccaagaagcgcccgcaggatcaaaaactgccagatattttgtgccagccccatcaacaccatcacgatgcccatgccgagggcagagcgtaatagcatgagttttcggcctttacggtcggcgagtccaccccaaaacggactggcgatggcgctaaataaaaatgtaatgctgaagacaataccggaccacatattcagggcggagtgaccggtaacgccaagctgctcaacgtagaggggtaagaagggcattaccagactgaaggcggcaccggtaagaaaacagcctagccaggcgacgatcaggtttcgtttccagtttataggggtgtcattttcacagggactcatagcaatccgctgttggtgcgccaggcgcggtgaacataagaagaaaagataagcacactaattatgcgcccgacttccagggggcgcaatccagagagcttttatcgctaaatcagggggatttgctgtggtaatgccggatgccattctgaagcatccggcatgggagatttaatagcgactaggaacgccttccgggcgtgttttaaagcgacggtgtaaccacatatactgctctggtgccatcatgatgcatttttcgaccactttgttcatccacgcggcggtagtttcggcatcatccagtggcggagaacactctggcggcagcataatcaattgataccctttgccatctggcttacggcgtggaacgaagggcaccagacatgcgccggacatccgtgccagcatccaggttccggtcgtggtcgcagcctgctcaacggcaaacaacgggacgaaaacgctactgcgcgggccgtaatcatgatccggtgcgtaccagaccacttcgccttttttcagggctttaatcatgccttttaaatctttgcggtcgagcatgcttttattactgcgcaaacggccccaggtttgtagccagtcaatcagtggattatcgttcgggcgataaacgccaatacccggttcctgcataccaaactgccgcgcacccagctccagtgtcagaaaatggatgccaactaacaggatgccgcgtttttgcgcctgcacgtcacgaatgtgttccatgccgatcacttccgtccagcgggcgattcggcggtccggccagaaccacgccatgccggtttccatcaggcccatgccaacggattcgaaattcttcaccaccattttacggcgttcttgttcgctcatttccgggaagcacagttccaggttgcgatgcacaatttttgcgcgtcgtttcataaaacgtaacgccagttttcctaatccacaaccgaggcggtagataaccgggtagggcaattgcacgactaaccaaagtacgccaatacccaaccaggttaaccaataacgcggatgaagcagtgcggtggagaacttgggtagattcgtcatatcaatcctgtttttcaacctattcgggcaattgtatgtattgtcgcattttttcgcccgcaaccaaaatttgtggctgaagactgggcgaaattgccgcgcttgtaaataacaaataatttttaatgcgcaaatgtagcgtaaaatgtgtggatgttaattatcgataattgctatatcatgccgcggatttttactttcccatctcgcaggaaccgtacaccatgccagtgttacacaaccgcatttccaacgacgcgctaaaagccaaaatgttggctgagagcgaaccgcgaaccaccattagcttttacaagtatttccacatcgccgatcctaaggcgacccgtgacgctttatatcagctgtttaccgcgctgaatgtttttgggcgagtgtatctggcgcatgagggcattaacgcgcaaatcagcgtacctgcgagcaatgttgaaacatttcgcgcgcagctctatgccttcgacccggctttagagggtttacgcctgaatatcgcgttggatgatgacgggaaatccttctgggtactgcgcatgaaggtacgcgatcgcattgttgccgacggtattgacgatcctcactttgatgccagcaatgttggtgagtatctgcaagcggcggaagtgaacgccatgcttgacgatcccgatgcactatttatcgacatgcgtaaccactatgagtatgaagtggggcactttgaaaacgcgctcgaaattccggcagataccttccgtgagcagctgccaaaagcagtcgagatgatgcaggcacataaagataaaaaaatcgtcatgtactgcaccggcggcattcgttgtgaaaaggccagtgcctggatgaaacataacggattcaacaaagtctggcatatcgagggcggaattattgaatacgcccgtaaggcgcgcgagcagggcttgccggtgcgttttattggcaaaaattttgtttttgacgagcggatgggcgaacgtataagcgatgagattatcgcgcattgccaccagtgcggcgcgccgtgcgacagccataccaactgtaaaaatgatggctgccacctgctgtttattcagtgtccagtatgcgcggaaaaatacaaaggttgttgtagtgagatttgctgcgaagaaagcgcgttaccgccagaagaacagcgacgccgtcgggcaggacgtgaaaatggcaataagatctttaataagtctcgtggacgtctgaatacaacactgtgcattcctgatccaacagaataaatatcattgccggatgcgtgccatccggcaacatttcacgcttacttctgctgtacgccttccacactaataatcagatccacttcctgagaagctggacctaaatctgtcttgatattgaagtccttgagcttaattttgccttcggcctcgaagcctgcacgtttaccaccccatgggtcgtcgccctgaccaattaatttcgcttccagcgtgacgggtttggttacgccattcagcgtcagatcgccggtaatatccagttcgtcaccgtctttcttcacgctggtggaggtgaatgttgcctgtggatattttgcggtattgaggaaatctgcactgcgaagatgtttatcgcgttcggcgtgattagtatcgacgctggtggtgttaattgtcacattcactttatcggcagccggatttttttcgtcaaaggtaaaagtaccgtcgaaatctttaaaggtgccgtataaccagctatagccaaggtgctggatgcggaaattaacaaaggcgtgctgaccttctttgtcaattttgtaatcggcggcaaccgcactaccggcagagaacatcagggacgcgaaggttaaaccaagcaggctttttttcattttttatactccatagtcagaactgctctttcccagcatgcgcttcagagtgtcgtctttatcgatgaaatgatgcttcagggccataaatccgtgcataacggacagtactacgacgctccacgcgagccaaaaatgcagggcaccggcaaagtctgcctgtgcgccagcgtcggcaagggtcgcggggacgtcaaaccagccaaaaacgctgatcggtttaccatcggcagtactgatcagatagccgctgatgccgatggcgaaaagcaataggtacaatgcgagatgtccagctcttgcggcaagacgagtcatggggctataactcggcagcggacccggcggtggagatatgacacgccacagaacgcgaataaccagccccatcattaacaaaataccgatgcttttatgcagttcgggtgctttgtgataccagccatcgtaataactgagcgtgaccatccacagacctaaagcaaacatgccgtagacaataattgcgcttagccaatggaaggccgcagatataacaccatagcgttcaggggtatttgtgaaactcataagtgcatccaaaacgaatttgcgagagaaagaaaatggcgtgtcggagaatgaattgcaacacaaaaataacaaattgaatgatatttatttttatttcaataattttgaattaataatgaaagaatcttcataagtttagtgggttcagcatcagagatgtctggtgagtgctgtagaagcaggaataatctcattcaatttttcacgctaaatgaaagggagattaaatatttgtcagtttatgtcagtgcggaaaattaaaaataaaacacatagatcagatccataattgccaacaatccccagagaaaaagataaagcatcagatgctcgcgaatattattgatgagatagtgcaacagccgacgcattaaatactcctgtaaaaacggcctcattctggaggccgtaatgatgattattggaagcgggaaagcctgaatggcgtcaaatcaaaatcgctttttttgtcttgcgcaaaatcggcagctatttcccctaaaacactcgcaaatttaaaaccgtgcccactcaggccggtaatgagcagtgtattatcgtggccgggtagggtatcgataataaaatcttcgtcagggctattatcataggtgcaggcagcgccgtacaggcagcaaccgatacccggcaatacattgcgcaagaacgggaaggcttcactcccatcactggccacttccgcaaacggaacacgttcatccgcactatggataacctggcctccgttatgtttgccaatcttcaacgcgtcgttttctgccggaaaaccataatattgatcgccattgggcagttcaccggtaaacgccgggaatttattcttcacgctatagcggccatcggcctgataccaggcaaatactttgcgtacgggctggacaggcagctccgggagcaggtcttttacccatgttcccgcgcagacaatcgcttttttcgcctgatactcaccgtcagccgtttcaatagttacgccatcatcgtcatgacgaattgcggtgaccgggcagttgaacagttgcgcacagcccgcttccttcgccagttggatccaggttttaatcgccagttcgctgcgcaaaaaaccggaatcagtttcaaataagccgatgtagttgtccgggacgcgtatttccggccagcgggccataatcccttgcgcatcgagcttttcaacgttgagttgccattgttcggcgctgtgggcgacgttggcgagaaatgtggaatcagccgggccaaggttaatgacgccagagcgtacaaaaatgggatcttcttcgttgtggcgggagagttcatcccacagcgtttgcgcgcggaggaccagcgggacatacttttcgccttcaccataagcatggcgaattaatcgcgtatcgccgtggtggctgccgtgttgatgcggtggcatatgggcgtcggtcattagcacgtttaaaccggcgcgggttgcataatacccggcggcagcgcctacggaaccgctgccaataatgatgagatcgtatttcatttttttctctctgctctcatggtttaagcagagtaattaactgaatgcagatatacaacccagaaatggtaaaggcaccggtgaggtgccttttgggtggatggtcatgtcatgttaatgacgccgatactcgtttacctggaaatcaccggattcaattttggcgattcctgcttctaatatgctaataaattgtctggcaacatcagtggttaaccagagcgtctgaccaacttcagtcccttcctgctcggacttatttggggtctggtagtgcaaacgcaacatcagcgcatcatagctatcaacggtgctgatgtcccaccctacgagcggatgagtctgaatgacttcattatttttttccatcatggccccctaattcgtgttactagacaacgttattcgaggttcaatgcgtttttatctgaagcaacttcagtataccaataagtaagggtattcaccgaatttttaaagggggaaacagataaatttctgcttttaagatttatatgaacaataaaacagcatgtcattcatatttttttagcatattgtgcaattattttgaggaagtgtagaaattttgtactcaaaattcgtaagtaaaataaaaaagccggggcgacccggcaaaaaaaatcactgcatattattcgctgacaaaccagtcatcggcgctttcccacgtttcctggagaatttcactaatgcgctgtttatcttcttttgtcgcgccaataacgcttaaattattcgctgcggcataacgtacgcttacgtggccttcattatcaggaaacgcatactgaatacggcgggaaagttcgccagccagggcgtcaatagccccagctggcaatggagaagttttcgctatggtgacttcaattcgcataatagccccctgttgaatatactggttatttatacaggtaaaataacctaatgacaacaggaagctacgatttttattgtttaacggaccagcgtaccgtttccccggcgaggaatggcaccagcgtgtcatcagtcagtgcgatgctttcagcaacctgttgctcttcacgtaccagttcgatgaatgtgtcgttgaccggcaacccatagaactgcgggccgtttacagaacagaatgcttcaaagtgctgcaaagcattcatttcttcaaagacggtagcgtaactgcccagcgcggttggggcgttgaagcagcccgcgcagccgcaactgctctctttgcgatgacgtgcatgtggcgcagaatccgtaccgaggaatactcgattaaaaccgctggcgaccagttcacgcaatgcctgttggtgaatattacgtttgaggatgggtagacaatacaggtgcggacgcacgcctccaaccagcatatggttgcggttaaacatcagatgctgcggagtgatggtggcagccagccgttcatttccgtcacggacatagtcggcagcatctttggtggtgatgtgctcaaaaacgactttcagcgcagtcaggcgctggcgcagaggttccatcacgctttctataaagcgcgcttcacgatcaaaaatgtcgatatctgcatgtgtcacttcaccatgcaccagtagcggcataccgattttttccatgcgctcaagtaccggcatgattgcgtcaatactcgtcacgccgtggctggagttagtggttgcgtttgccgggtaaagttttgcagcggtgaacacgccttcgttaaatccgcgctccagctcattaggatccaggctatctgttaaataacaggtcatcaatggggtgaaatcgtgcccggcaggtacggcgtcaagaatacgctggcgatacgccacggcagcctcaacggtggtcacgggcggagccagattgggcattacgatagcccgtccataaatttcgctggtatatggcacgacagtttttaacatgtcgccatcgcggaggtgaaggtgccagtcgtctgggcggcggatctttaatacctgggatggtgcagtcattaatctctatgctccggctgaagggatgtttttgccggacacaaaggataagcggaaacgttttcctttgcacgaaaaataaagggcgcgaatgcgccctcgtgattaatcagtaaatggaatgacaatttcgcctggcttcacttcaatgcctttcgccagttttttcgccattgcttcgccctggctgccatcttcgcgcaggacgtaagcaggttgctggttaaagtaattgcgtaatgcctggttcaaatagggaagcaacgtttgcatcaccgtttgcattttttccggttgtaccgtcgcatcgaccacttccatctctttcaggaagatcgcacctttttctttatcaaacacgggcagcgctttcagcttcagtttcatggtcgctttctgactaccgaacagggagttcatgtccagattggcgtctccggttagggtaaccttattcggctcttcgcgaccaatttggctggtcaggtttgtcagaacaatatgggcgtcagccacgccgggtaaaccgatatctttactgaaattattatgtttcgcaaggctctggttaatttcttgttcggtgatggtgtattgggtgagttgattacagccaacgagcaggccactgacgatcaatgcagcggcaaataaaaacttgttcatggtagtcctcgacatgaaatctgcgtcaatatcctgacacaacgcagcatgtgtcaccagcgataaactcgccagcagaaaaaactgaaaacggcggcaacccgcgaatacaggctgccgcggcgggtcaggattaaatcgccatactacttaacaaattgatttgtgtctgtttcgccatattatcgcggtaatcagcaacgcggcttggccagttaattccggctaccagcgtcagattacgcagtagcgggaatagctgaatatcatcttcgctaagttcgccattcacggcgttcggtttgacgatcagtttgtccagcgcacgtaaatcatcgctgatattcttaatcagaccgtcagagtgggccagcaggtcggcaaaattacccgcgctggcctctttcttgtcgacgaaatatttgcgcgcggcgggagtagaaaactcatcaaatgcgcttttggcaaaacgcggcaacagcagtttgttggcgtagccattgaccttgcgcagccactcttcaatggcaggggaacgtttgccggtcagtaacggtttgccgtcgagtttatcgacatagtgaacgatgtccatgctttctggcatatagcggctgtcatctttttgcagaatgggaacctgtttttgaccgaccatccgggtgggtgtttctgcgtcgtcgttgagcagaacatgtaattcgacggggatatttttcaggccgaaaatcatgcgggctttgaggcagtaagggcagtgatcgtaaatgtatagcttcacgtgactcctccatttggctgtcagttcactttcagtatgaaggagtcaggggggagtatcaaatcaggcgtcgcgttcaagcaaacgacgcgcggcgcgtttctggctaaactgccaacccagcgcaaggaaagtgaagatgccaataatgcccagcatcatccacggaagctctggctggtgcgcgcttttgcccaggtcaaacagccagccgccaccgatataaccaatagcgccgccaatcgccagacccagacggctaaaccccatatagctgccgcgagctcttgcgtccgccaggctagcacttaaggtttcacgcgcaggctcggcaatgatgctcccgatataaaacagacaaatcagggtgaaaagttgttgcaggccgctgaccatgcccaccggcatcatgcttaaactcattatcaacagcccagccatcaaccggtgttccagacgaaaatgcttttcactccagcgggcgatagggtagagcaacgttaagctcagacacgcttcaatggcatacatccatttaacggcagagggcgcgcagccacgtcgttgaccataattggcagcatcagcatcacttgtacagccagcatgtagtaacccgccagcgtcagaacataggtgacaaaacgcttgtcacgcatcacgcgggtcatgccttcgcgaacgggcgtgcgtacggtggagagtttccatgctggtaacaaccacgcattgaacgccgcacatagcacaaatagaactgcccctgtggcgcagaccaggcgaaagtcgtattgcaacagccagctccccaacaatgcgccaatgaccgcaccggcactgtcctgcatcatcaacaggctgaaaaaacgaccacgctgctgtggacggattaatttcaccaccagcgcgctacgcggcggatcaaacaacgtgccaccgagtccgctgagcaggcaactaaaccacaatagccacggttcgtgggcgatacccattgtggcgaatccggcggcgcgcatcagcataccggtaacaatcatcggtttggcaccaaagcggtcggcaattgcaccgccgaaaatacccagaccttgctgaataaattggcgtagaccgagagcaataccgaccatgacggcggcccagcccatttgatcaacgaagcggatagagatcagcgggaagacaacaaagaaccccagcacgaccagcatattatcgatgagcaggaaatatttacccaggttcctcgcctggctcacgcgggacatttcccctcccgggaaataaaagatgagcactttctattctgcattgccgctaagacttttcccatcacttcggggacaatatttttttatcaaaacgtcgctttgatagagagtttttatcaaatatgtgaataatgcagaaaatggcattttggacttttcacagggtctggttgcgcaggtatagtaatacttacagcgtattaaagacgttacgggaaggagtaggtatagaatgtttggctatcgcagtaacgtgccaaaagtgcgcttaaccacagaccgactggtcgtgcgtctggtgcatgatcgtgatgcctggcgtcttgcggattattacgcagagaatcgccatttcctcaagccctgggagccagtgcgcgacgaaagccactgttatccaagtggctggcaggccaggctggggatgattaacgaatttcataaacaaggtagtgctttctactttggcttattcgacccggacgaaaaagagattattggcgttgccaatttttccaatgttgttcgtggctcttttcatgcctgctatctcggttatagcattgggcaaaaatggcagggcaaaggactcatgtttgaagccctgaccgcagccattcgttatatgcagcgcacccaacatattcatcgcattatggctaattatatgccgcacaataaacgcagcggtgatttactggcgcgactgggttttgaaaaagaaggctatgcgaaagactatctgttgattgatggacaatggcgcgatcacgtactgacggcattaactaccccagactggacgcccggccgctaaggagaatctcatgaaatatcaacttactgcccttgaagctcgcgtgattggttgcttgctggaaaagcaggtgaccacgccggagcaatacccgctcagtgtcaatggtgtagtcacggcctgtaatcagaaaacgaaccgtgaaccggtcatgaatctgagtgaatccgaagtgcaggaacagctggataatctggtcaaacgtcattatctacgcacagtgagcggttttggtaatcgggtcaccaaatatgagcaacgtttttgtaatagtgaatttggcgatctgaaactgagcgcagcggaagtggcgttaatcaccacgttgttattgcgtggtgcccagacgccaggtgaactgcgcagccgcgccgcgcgaatgtatgaattcagcgatatggcggaagtggagagcacgctggaacaactggcaaatcgcgaagatggtccttttgtggtgcgtctggcccgcgaaccgggtaaacgcgaaaaccgctacatgcatcttttcagtggtgaggttgaagatcagccggcggtgacggatatgagcaacgcggttgacggtgatttacaggcccgcgtcgaagccctggaaatcgaagtggcagaactgaaacagcgtcttgatagcttgctggcccatctgggagattaaagtgaaaaaattacgtatcggcgtagtgggattaggtggcattgcgcaaaaagcgtggttaccggtgctggcggcagcgtctgactggacgttacaaggagcctggagccctacgcgcgcgaaagccctgccaatttgtgaaagctggcgcattccttatgccgatagcttatccagccttgccgccagttgcgatgcggtttttgtgcattccagcaccgccagccactttgacgtggtcagtacgttactcaatgcgggggtacatgtctgtgtcgataaaccgctggcagaaaatctgcgcgatgctgaacggctggtggaactggcggcgcggaaaaaactgacgttgatggtcggttttaaccgtcgtttcgcaccactctacggtgagttaaaaacgcaactcgccaccgcagccagcctaagaatggataaacatcgtagcaatagcgtcgggccacacgatctttatttcacgttgctggatgattatctgcatgtggtggataccgcgctgtggttgagcggcggcaaagcctctctggatggcggtacgctactgactaacgacgctggcgaaatgctgtttgccgagcaccattttagcgctggtcctttgcagatcaccacctgtatgcatcgccgtgccggaagtcagcgtgaaaccgtgcaggccgtgactgacggtgcgctcatcgacattacggatatgcgcgaatggcgtgaggagcgcgggcagggcgtagtgcataaaccgattcctggttggcagagtacgcttgagcaacgtgggtttgtcggctgtgcgcggcacttcattgaatgtgtgcaaaaccagacagttccgcaaaccgccggcgaacaggccgtgctggcgcaacgtatcgttgacaagatctggcgcgatgcgatgagtgaataaaccctgtaacatctggcggtagcaattcaccataatccaggtagactattcgcctctttcagcgcctgccttgcaggcgttttgcccgtgggtctggattagaacaccgatgaatttattaaaaagcctggccgccgtcagcagcatgaccatgtttagccgtgtgcttggcttcgcacgagacgcaattgtcgccagaatctttggcgcagggatggcaaccgacgcctttttcgtcgcttttaaacttcctaacttgttacgccgtatctttgccgaaggggcattttcccaggcatttgtaccgattctggcggaatataaaagtaagcagggtgaagacgccacgcgggtctttgtctcttatgtttctggcctgctgacacttgcgctggcggttgtgacggtcgctggcatgctcgccgcaccgtgggtgatcatggtgaccgcgccaggcttcgctgacacagctgacaaatttgccctgaccagccagctactaaagattacctttccctatatcttgctgatctccctggcgagcctggtgggagcgattctgaatacgtggaaccgcttcagcattccggcgtttgctccaacactgcttaacatcagcatgattggtttcgcgctgtttgccgcaccgtactttaacccaccggtgctggcgctggcgtgggctgttacggtcggcggcgtcctgcagctggtgtatcagctaccgcacctgaagaagatcggcatgctggtcctgccgcgcattaacttccacgatgccggagcaatgcgcgtggtgaaacagatgggaccggcgatccttggcgtctctgtgagccagatctccttaatcatcaacaccatttttgccagctttcttgcttccggtagcgtgtcttggatgtattacgccgaccgcttaatggagtttccgtccggtgtgctgggcgtggcgcttggcaccattttgctgccgagcctgagcaaaagttttgccagtggcaatcatgatgaatacaaccgtttgatggactgggggttgcgtctttgtttcctgttggcgctgccgagtgcggttgcgttgggcattctttccggtccgttgaccgttagcctgttccagtacggtaaatttaccgcgtttgatgcgctgatgacccagcgggcgttaattgcctacagcgtgggtttgattggcctgattgtagtgaaagtgttggctcctggcttttattcccgccaggacattaaaacgccagtgaaaattgccatcgttacgctgattttaacgcaattgatgaacctggcgtttattggtccgttgaaacatgccgggctgagtctttctattggtctggcggcgtgtctgaatgctagcctgctttactggcagttgcgtaagcagaaaatctttaccccgcaacccggctggatggcgtttctgttgcgtctggtggtggcggtactggtgatgtctggcgtgcttttaggtatgttacatatcatgccggagtggagtttgggtaccatgccctggcgtttactgcgtttaatggcggtcgtgctggcggggattgccgcgtacttcgctgcactggcggtactgggcttcaaagttaaagaatttgcccgccggacggtgtaacaatgcattccggcctgcagtgttcgctttaaaacatatcatgaaactgggtatgttttgtctgcctgctctgggatcgctggggcgggcatttttttgcctattttgcattgttggttagcaaggatgccattcgatgaattttaatatgttgattcaaagatgaaataaaaaagccctggcagttaccagggcttgattactttgagctaattattactcaacaggttgcggacgcgcaggagcggcagaggcatgatgtgttgccgtatgaccacctgcggcacctttaccttcgaaggcaaaagtagggcgctgccagtcactgtgacgcggtgcctccggaacatattccggtgctggagcgcgcgtcattggcgcggtagcgtggttatgctcaacggtgacctcaggttcgaccgcagctaccgtttcaacttctgctgcgacttcagcgactactggcgcggcaggttgagcaacaacttcaggttcagcaactacaacctcagcagtttcgacaacttcttcaatatctgccgtctcttcctgcggttcaaccaccggttctgcttgttctgcaacttcctgggctacggcaacatcagactcggtaatcacctgcggctgttcagttaccgcggcagcgatcacttcaggatgcgtcgtttcaaccacttccggttgcggttcggcaacctgaacgggggcttctacgacaccggccacttcttcaacaactggcgcgctaacaaccggttcgatagcggcggcgacagggacctcagtcaccatcggctgcacatgtacttcttcctgttcgcgctgctcttcaacctgtacatcttgcggacgtacaattggatagcggatccagactttgccagaggccagttccggagacgcgcacgctacggtcaacggcattgggctctgggttggataacgctcgtcacgatagcgacgacgacgctgaccacttacgcgcaggtgacgagggctgcggcgagaacgacgcggcatgccaccgttgtcacggttatcagcattgttctcttcttgctgttctggtgcagtttgcgctacgactggcagcgggactttcaccagttctgtgcgtggagctggcgcttcctgaacaattggttcggcagcgacagtttcttcaaccaccggtgcgactaccgcttcttcggctacgctttgctcgtaacgcactttctgattgagctgacgctgtttacgacgcggctgaaccggacgtacacgttcttcctgttcggtttcctgaacagattgctcttcaacattcagcgccttcgcttcttgttgcgcctgacgtttatcatcattacggcggcggctacgttcacgacgcggcgcttgctgctcgtcggcggtacgcgctttttccgttacctcagcctgctgacggctctcacgcgtctcggcagtctgctgctgtgcctggcgacgattacgacggttttcttcgcgattatcgctgccttcagtacgttcactacgggtgtcgcggcgctcattacggtcacggcggttgttctgacgaggcttgcgacgatcctgttgacgttccggtttcgcttctgctttcggtgctggttgctcggtcggtttggtttcttcaccaccgctgaacagcgctttcagtgcgccgaagaagcggctcaacagcccaggttgtgcaggagctgctggtgttgccggtgcagctttcggtgctggagctacaacaggcgcggcaggttcagctggcgttggcgcaggcggcacatccggcatggcaaaggttgccagcgcaggttgttccggacgcttacgttcagcgaactcttcttcagacggcagcgccatcgcttcttcatgcagcttcggcagcatgtagcttaaggttggggtttcttcccctttacgcacgcgcagcacgtggtagtgcggggtttccatctgatcgtttggcacaattacacagcgcacaccgtcctgacgagtttcaatggcatttaccgcagaacgtttttcattcagcaggtaagaagcgattggcacaggaacaatggcgtgaacttcctgggtgttctctttcagcgcttcttcttcgatcagacgcagaatagagaggctcaggctttcgttgtcacgcacggtgccagtaccagaacaacgcggacaaacgtgatgactggattcacccagacttgggctcaggcgctgacgggacatttccagcaggccaaagcgagaaatatggctgatttgaatacgcgcacggtcctgacgcaccgcttcacgcagacggttttctaccgcacgctggtggcgtactggcgtcatgtcgatgaagtcgataacaatcaggccgccgaggtcacgcaggcgcagctgacgagcaatctcatcggcagcttcgaggttagtgttaaacgcggtttcttcgatatcgccgccgcgggtcgcgcgtgcggagttgatgtcgatggccgttaacgcttcggtgctgtcgataacaatggaaccaccagacggcagacgaacttcacgctggaaggcggactcgatctgactctcgatctggtagtggctgaacagcgggatctcgccggtgtacagtttgattttgctgctgaaatccgggcgacctaatgcagcgatatgctgacgtgccagttcgagcactttcgggttatcgataaggatttcgccgatgtcctgacgtaagtaatcgcggaatgcgcgaacgattacgttgctctcctgatgaatcaggaacggggccgggcggctttcagcggcttttttgatggcttcccagtgtttcagacggaagcttaaatcccattgcagcgcctcagcagatttgccgacgccagcggtgcgcacgataagccccatgccttccggcagttcaaggcttgccagtgcttcttttaattcggtacggtcgtcgccttcgatacggcgagaaatgccacccgcgcgcgggttgttcggcatcagaaccagatagctacccgccagactgataaaggtggttaatgccgcgcctttgttgccgcgctcttctttatcgatctgaacaatgacttcctgaccttcacgcaacacatctttaatgttgggacgaccatgagcactgtagttagcagggaaatattcgcgggcaatttcttttagtgggaggaaaccgtgacgttcagcgccgtaatcaacaaaagcagcttccagactcggttcaatgcgggtgattttacctttgtagatgtttgcctttttctgctcgtgccctggactttcgatatccaggtcatacagacgctgcccatctacaagggcaacgcgcaactcttcctgctgagttgcgttgattaacattcttttcatcgtaacttactcattattcttacattgacgactaagctgcgggcaaagtaacgcctttccgggtgtgaaccgatggcctcgtgtctagtcgcgtcgccaacctcacggttatcgtcagctcaaagaggcgcagagtgtgagttgcccgtttttcatgcggaaaaacagcgcaattatcaaagaaacagactgggtattactctccagaaatatttccatctaccggtaaggactgcaacccgcagcccgctaactgcctgaaagatcaatacgtcttacgccattgctgcgtggatgatcggtcgggcaaaatgggttattccgtaaaatttcttgttttaacaaggatggacacggaaacggcctcattattccactgcaagccttgttatagcaagatgacttttaccatttatcacccgcttactcacagttttttcacttcttgctggtgattggtttaataaccatcaataaagtgatcacgcagtgaagtaataaggtgcaaaagtaaatataagcatagaaaaatgagtggcgcgaatcctgttggctaattagaatcgccaaccatgaaaacagagactccatccgtaaaaattgttgctatcaccgctgacgaagcggggcaacgtatcgataactttttgcgtacccaattgaaaggcgtaccaaaaagtatgatttaccgtattttgcgtaaaggcgaagtgcgggtgaacaaaaaacgtattaagcctgaatataaactcgaagcgggtgatgaggtgcgtattccaccggttcgcgttgctgagcgggaagaagaggcggttagcccacatctgcaaaaggtggcggcgctggcggacgtcatcttatatgaagatgatcacatcctggtgctgaataaaccttccggtacggcggtacatggcggcagtggtttaagcttcggcgttattgaaggtttgcgggcgttgcgcccggaagcgcggttccttgaactggttcatcgtcttgaccgggacaccagtggtgttttgctggtagcgaaaaaacgcagcgcgttgcgttctctgcatgagcaattacgtgaaaaagggatgcaaaaagattacctggcgctggtgcgcggtcagtggcagagccatgtgaagagcgttcaagcaccgttactgaaaaatattctgcaaagcggcgaacgtatcgtgcgtgtgagtcaggaaggcaaaccgagcgaaacacgctttaaagtggaagaacgctatgcatttgccaccctggtgcgttgtagcccggtaacagggcgtactcaccagatccgtgtgcatacacaatatgcgggtcatccgattgcctttgacgatcgctacggtgaccgtgaatttgacaggcagctcactgaagcaggcacgggattaaatcgcctgttcctgcacgctgcagcgttgaagtttactcatccggggaccggtgaggtgatgcgtatcgaagctccgatggatgaaggtttgaagcgttgtttgcaaaagctgcgtaacgcgcgctaatacaagcatataaacctgataatgggcggttggcctgataaggcgtttacgccgcatcaggccgccagcaccgattgccggatgcgacgtaaccacatccggcgcaaaaaattatcccatcagcgggtttttcccttcccgacgtaacatctgacacagcgcgattagcggtaaaccaaccagcgtgttaggatcacgcccctctaaacgctcaaacagcgtaatgccaaatccttcactcttaaagctacccgcgcagtgcaggggatgctctttacgcacgtaattatcaatctccgcctcgctcaggtgacggaaatggacgtcaaaaggctccacttctgtttgcagatgcccattcgcgctattaaacaacgccagtccagtatagaaggtgacgatattgccgctggctttgcgtaattgcagacgggcattttcttccgttaacggtttaccggtgatttcgccatcaagaacacatacctggtcactaccaataattaaatgatccggataacgactcgccagagattgcgctttttcttgtgccagtcgaagcaccaactgtcgcggactttcgtcgctgcgtggggtttcgtcgacctctggtgctgcacattcaaaagagatttgcagtttttccagaagagcgcgacgccatgggctggtggaggctaaaataagtttaggcatatttttttccatcagatatagcgtattgatgatagccattttaaactatgcgcttcgttttgcaggttgatgtttgttatcagcactgaacgaaaataaagcagtaacccgcaatgtgtgcgaattattggcaaaaggcaaccacaggctgcctttttctttgactctatgacgttacaaagttaatatgcgcgccctatgcaaaaggtaaaattacccctgactctcgatccggttcgtacggctcaaaaacgccttgattaccagggtatctatacccctgatcaggttgagcgcgtcgccgaatccgtagtcagtgtggacagtgatgtggaatgctccatgagcttcgctatcgataaccaacgtctcgcagtgttaaacggcgatgcgaaggtgacggtaacgctcgagtgtcagcgttgcgggaagccgtttactcatcaggtctacacaacgtattgttttagtcctgtgcgtagtgacgaacaggctgaagcactgccggaagcgtatgaaccgattgaggttaacgaattcggtgaaatcgatctgcttgcaatggttgaagatgaaatcatcctcgccttgccggtagttccggtgcatgattctgaacactgtgaagtgtccgaagcggacatggtctttggtgaactgcctgaagaagcgcaaaagccaaacccatttgccgtattagccagcttaaagcgtaagtaattggtgctccccgttggatcggggataaaccgtaattgaggagtaaggtccatggccgtacaacagaataaaccaacccgttccaaacgtggcatgcgtcgttcccatgacgcgctgaccgcagtcaccagcctgtctgtagacaaaacttctggtgaaaaacacctgcgtcaccacatcactgccgacggttactaccgcggccgcaaggtcatcgctaagtaatcacgcatctgcgtgatgaagcttagtgaggattttccccaggcaactggggaaagaccaaaccgggcggcgacgataccttgacacgtctaaccctggcgttagatgtcatgggaggggattttggcccttccgtgacagtgcctgcagcattgcaggcactgaattctaatagccaactcactcttcttttagtcggcaattccgacgccatcacgccattacttgctaaagctgactttgaacaacgtagccgtctgcagattattcctgcgcagagtgttatcgccagtgatgcccggcctagccaagctatccgcgccagtcgtgggagtagtatgcgcgtggccctggagctggtgaaagaaggtcgagcgcaagcctgtgtcagtgccggtaataccggggcgctgatggggctggcaaaattattactcaagcccctggaggggattgagcgtccggcgctggtgacggtattaccacatcagcaaaagggcaaaacggtggtccttgacttaggggccaacgtcgattgtgacagcacaatgctggtgcaatttgccattatgggcagtgttctggctgaagaggtggtggaaattcccaatcctcgcgtggcgttgctcaatattggtgaagaagaagtaaagggtctcgacagtattcgggatgccagtgcggtgcttaaaacaatcccttctatcaattatatcggctatcttgaagccaatgagttgttaactggcaagacagatgtgctggtttgtgacggctttacaggaaatgtcacattaaagacgatggaaggtgttgtcaggatgttcctttctctgctgaaatctcagggtgaagggaaaaaacggagctggtggctactgttattaaagcgttggctacaaaagagcctgacgaggcgattcagtcacctcaaccccgaccagtataacggcgcctgtctgttaggattgcgcggcacggtgataaaaagtcatggtgcagccaatcagcgagcttttgcggtcgcgattgaacaggcagtgcaggcggtgcagcgacaagttcctcagcgaattgccgctcgcctggaatctgtatacccagctggttttgagctgctggacggtggcaaaagcggaactctgcggtaacaggacgctgccagcgaactcgcagtttgcaagtgacggtatataaccgaaaagtgactgagcgtacatgtatacgaagattattggtactggcagctatctgcccgaacaagtgcggacaaacgccgatttggaaaaaatggtggacacctctgacgagtggattgtcactcgtaccggtatccgcgaacgccacattgccgcgccaaacgaaaccgttagtaccatgggctttgaagcggcgacacgcgcaattgagatggcgggcattgagaaagaccagattggcctgatcgttgtggcaacgacttctgctacgcacgctttcccgagcgcagcttgtcagattcaaagcatgttgggcattaaaggttgcccggcatttgacgttgcagcagcctgcgcaggtttcacctatgcattaagcgtagccgatcaatacgtgaaatctggggcggtgaagtatgctctggtcgtcggttccgatgtactggcgcgcacctgcgatccaaccgatcgtgggactattattatttttggcgatggcgcgggcgctgcggtgctggctgcctctgaagagccgggaatcatttccacccatctgcatgccgacggtagttatggtgaattgctgacgctgccaaacgccgaccgcgtgaatccagagaatagtattcatctgacgatggcgggcaacgaagtcttcaaggttgcggtaacggaactggcgcacatcgttgatgagacgctggcggcgaataatcttgaccgttctcaactggactggctggttccgcatcaggctaacctgcgtattatcagtgcaacggcgaaaaaactcggtatgtctatggataatgtcgtggtgacgctggatcgccacggtaatacctctgcggcctctgtcccgtgcgcgctggatgaagctgtacgcgacgggcgcattaagccggggcagttggttctgcttgaagcctttggcggtggattcacctggggctccgcgctggttcgtttctaagataaggattaaaacatgacgcaatttgcatttgtgttccctggacagggttctcaaaccgttggaatgctggctgatatggcggcgagctatccaattgtcgaagaaacgtttgctgaagcttctgcggcgctgggctacgacctgtgggcgctgacccagcaggggccagctgaagaactgaataaaacctggcaaactcagcctgcgctgttgactgcatctgttgcgctgtatcgcgtatggcagcagcagggcggtaaagcaccggcaatgatggccggtcacagcctgggggaatactccgcgctggtttgcgctggtgtgattgatttcgctgatgcggtgcgtctggttgagatgcgcggcaagttcatgcaagaagccgtaccggaaggcacgggcgctatggcggcaatcatcggtctggatgatgcgtctattgcgaaagcgtgtgaagaagctgcagaaggtcaggtcgtttctccggtaaactttaactctccgggacaggtggttattgccggtcataaagaagcggttgagcgtgctggcgctgcctgtaaagcggcgggcgcaaaacgcgcgctgccgttaccagtgagcgtaccgtctcactgtgcgctgatgaaaccagcagccgacaaactggcagtagaattagcgaaaatcacctttaacgcaccaacagttcctgttgtgaataacgttgatgtgaaatgcgaaaccaatggtgatgccatccgtgacgcactggtacgtcagttgtataacccggttcagtggacgaagtctgttgagtacatggcagcgcaaggcgtagaacatctctatgaagtcggcccgggcaaagtgcttactggcctgacgaaacgcattgtcgacaccctgaccgccagcgcgctgaacgaacctagtgcgatggcagcggcgctcgagctttaaaagaggaaaatcatgaattttgaaggaaaaatcgcactggtaaccggtgcaagccgcggaattggccgcgcaattgctgaaacgctcgcagcccgtggcgcgaaagttattggcactgcgaccagtgaaaatggcgctcaggcgatcagtgattatttaggtgccaacggcaaaggtctgatgttgaatgtgaccgacccggcatctatcgaatctgttctggaaaaaattcgcgcagaatttggtgaagtggatatcctggtcaataatgccggtatcactcgtgataacctgttaatgcgaatgaaagatgaagagtggaacgatattatcgaaaccaaccttagttctgttttccgtctgagtaaagcggtaatgcgcgctatgatgaaaaagcgtcatggtcgtattatcactatcggttctgtggttggtaccatgggaaatggcggtcaggccaactacgctgcggcgaaagcgggcttgatcggcttcagtaaaagtctggcgcgcgaagttgcgagtcgcggtattactgtaaacgttgttgctccgggctttattgaaacggacatgacacgtgcgctgagcgatgaccagcgtgcgggtatcctggcgcaggttcctgcgggtcgcctcggcggcgcacaggaaatcgccaacgcggttgcattcctggcatccgacgaagcagcttacatcacgggtgaaactttgcatgtgaacggcgggatgtacatggtctgaccgcgatttgcacaaaatgctcatgttgcgcgcagtctgcgtggttatgagtaataattagtgcaaaatgatttgcgttattggggggtaaggcctcaaaataacgtaaaatcgtggtaagacctgccgggatttagttgcaaatttttcaacattttatacactacgaaaaccatcgcgaaagcgagttttgataggaaatttaagagtatgagcactatcgaagaacgcgttaagaaaattatcggcgaacagctgggcgttaagcaggaagaagttaccaacaatgcttctttcgttgaagacctgggcgcggattctcttgacaccgttgagctggtaatggctctggaagaagagtttgatactgagattccggacgaagaagctgagaaaatcaccaccgttcaggctgccattgattacatcaacggccaccaggcgtaagtgaacatctccaggcggtcgttcgaccgcctgagttttatctttttgtcccactagaatcattttttccctccctggaggacaaacgtgtctaagcgtcgtgtagttgtgaccggactgggcatgttgtctcctgtcggcaataccgtagagtctacctggaaagctctgcttgccggtcagagtggcatcagcctaatcgaccatttcgatactagcgcctatgcaacgaaatttgctggcttagtaaaggattttaactgtgaggacattatcagccgcaaagaacagcgcaagatggatgccttcattcaatatggaattgtcgctggcgttcaggccatgcaggattctggccttgaaataacggaagagaacgcaacccgcattggtgccgcaattggctccgggattggcggcctcggactgatcgaagaaaaccacacatctctgatgaacggtggtccacgtaagatcagtccattcttcgttccgagtacgattgtgaacatggtggcaggtcatctgactatcatgtatggcctgcgtggcccgagcatctctatcgcgactgcctgtacttccggcgtgcacaacattggccatgctgcgcgtattatcgcgtatggcgatgctgacgtgatggttgcaggtggcgcagagaaagccagtacgccgctgggcgttggtggttttggcgcggcacgtgcattatctacccgcaatgataacccgcaagcggcgagccgcccgtgggataaagagcgtgatggtttcgtactgggcgatggtgccggtatgctggtacttgaagagtacgaacacgcgaaaaaacgcggtgcgaaaatttacgctgaactcgtcggctttggtatgagcagcgatgcttatcatatgacgagtccgccagaaaatggcgcaggcgcagctctggcgatggcaaatgctctgcgtgatgcaggcattgaagcgagtcagattggctacgttaacgcgcacggtacttctacgccggctggcgataaagctgaagcgcaggcggtgaaaaccatcttcggtgaagctgcaagccgtgtgttggtaagctccacgaaatctatgaccggtcacctgttaggtgcggcgggtgcagtagaatctatctactccatcctggcgctgcgcgatcaggctgttccgccaaccatcaacctggataacccggatgaaggttgcgatctggatttcgtaccgcacgaagcgcgtcaggttagcggaatggaatacactctgtgtaactccttcggcttcggtggcactaatggttctttgatctttaaaaagatctaagttgtcattttccacccttataaaaggtccgcttgcgggccttttttcttagcttttattccgacttgttccgtagtgaacatgctgccacactaacaattctctgataaggagccggtatgttcttaattaacggtcataagcaggaaagcctggcagtaagcgatcgggcaacgcagtttggtgatggttgttttaccaccgccagagttatcgacggtaaagtcagtttgttaagcgcgcatatccagcgactacaggatgcttgtcagcggttgatgatttcctgtgacttctggcctcagcttgaacaagagatgaaaacgctggcagcagaacagcaaaatggtgtgctgaaagtcgtgatcagtcgcggtagtggcgggcgagggtacagcacattgaacagcggaccggcaacgcggattctctccgttacggcttatcctgcacattacgaccgtttgcgtaacgaggggattacgttggcgctaagcccggtgcggctggggcgcaatcctcatcttgcaggtattaaacatctcaatcgtcttgagcaagtattgattcgctctcatcttgagcagacaaacgctgatgaggcgctggtccttgacagcgaagggtgggttacggaatgctgtgcggctaatttgttctggcggaagggcaacgtagtttatacgccgcgactggatcaggcaggtgttaacggcattatgcgacaattctgtatccgtttgctggcacaatcctcttatcagcttgtcgaagtgcaagcctctctggaagagagcttgcaggcagatgagatggttatttgtaatgcgttaatgccagtgatgcccgtatgtgcctgtggcgatgtctcctttagcagtgcaacgttatatgaatatttagccccactttgtgagcgcccgaattaatcatgaaaaaagtgttattgataatcttgttattgctggtggtactgggtatcgccgctggtgtgggcgtctggaaggttcgccatcttgccgacagcaaattgcttatcaaagaagagacgatatttaccctgaagccagggaccggacgtctggcgctcggtgaacagctttatgccgataagatcatcaatcgtccacgggtttttcaatggctgctgcgtatcgaaccggatctttctcactttaaagccgggacttaccgctttacaccgcagatgaccgtgcgcgagatgctgaaattgctggaaagcggtaaagaagcacagttccctctgcgactggtagaagggatgcgtctgagcgattacctcaagcaattgcgtgaggccccgtatatcaagcatacgctgagcgatgataagtacgccaccgtagcgcaggcacttgaactggaaaacccggagtggattgaaggttggttctggccagacacctggatgtataccgccaataccaccgatgtcgcgttactcaagcgagcgcacaagaaaatggtgaaagcggtcgatagcgcctgggaagggcgtgcggacggtctgccttataaagataaaaaccagttggtgacgatggcaagtattatcgaaaaagaaaccgccgttgccagtgaacgcgataaggttgccagtgtatttatcaaccgtttacgcattggtatgcgcctgcagaccgacccgaccgtgatttacgggatgggagagcgttataatggcaaactttctcgtgcagacctggaaacgccgacagcgtataacacctataccattaccggtctgccgccaggtgcgatagcgacgccgggggcggatagcctgaaggctgctgcgcatccggcaaaaacgccgtatctctattttgtggccgatggtaaaggtggtcacacgtttaataccaatcttgccagtcataacaagtctgtgcaggattatctgaaagtgcttaaggaaaaaaatgcgcagtaagtatatcgtcattgaggggctggaaggcgcaggcaaaactaccgcgcgtaatgtggtggttgagacgctcgagcaactgggtatccgcgacatggttttcactcgggaacctggcggtacgcaacttgccgaaaagttaagaagcctggtgctggatatcaaaagcgtaggcgatgaagtcattaccgataaagccgaagttctgatgttttatgccgcgcgcgttcaactggtagaaacggtcatcaaaccagctctggctaacggcacctgggtgattggcgatcgccacgatctctccactcaggcgtatcagggcggcggacgtggtattgaccaacatatgctggcaacactgcgtgatgctgttctcggggattttcgccccgacttaacgctctatctcgatgttaccccggaagttggcttaaaacgcgcgcgtgcgcgcggcgagctggatcgtattgagcaagaatctttcgatttctttaatcgcacccgcgcccgctatctggaactggcagcacaagataaaagcattcataccattgatgccacccagccgctggaggccgtgatggatgcaatccgcactaccgtgacccactgggtgaaggagttggacgcatgagatggtatccatggttacgacctgatttcgaaaaactggtagccagctatcaggccggaagaggtcaccatgcgctactcattcaggcgttaccgggcatgggcgatgatgctttaatctacgccctgagccgttatttactctgccaacaaccgcagggccacaaaagttgcggtcactgtcgtggatgtcagttgatgcaggctggcacgcatcccgattactacaccctggctcccgaaaaaggaaaaaatacgctgggcgttgatgcggtacgtgaggtcaccgaaaagctgaatgagcacgcacgcttaggtggtgcgaaagtcgtttgggtaaccgatgctgccttactaaccgacgccgcggctaacgcattgctgaaaacgcttgaagagccaccagcagaaacttggtttttcctggctacccgcgagcctgaacgtttactggcaacattacgtagtcgttgtcggttacattaccttgcgccgccgccggaacagtacgccgtgacctggcttagtcgcgaagtgacaatgagtcaggatgcattacttgccgcattgcgcttaagcgccggtagccctggcgcggcactggcgttgtttcagggagataactggcaggctcgtgaaacattgtgtcaggcgttggcatatagcgtgccaagcggcgactggtatagcctgctagcggcccttaatcatgaacaagctccggcgcgtttacactggctggcaacgttgctgatggatgcgctaaaacgccatcatggtgctgcgcaggtgaccaatgttgatgtgccgggcctggtcgccgaactggcaaaccatctttctcccagccgcctgcaggctatactgggggatgtttgccacattcgtgaacagttaatgtctgttacaggcatcaaccgcgagcttctcatcaccgatcttttactgcgtattgagcattacctgcaaccgggcgttgtgctaccggttcctcatctttaagagagacatcatgtttttagtcgacagtcactgccatctcgatggtctggattatgaatctttgcataaggacgtggatgacgttctggcgaaagccgccgcacgcgatgtgaaattttgtctggcagtcgccacaacattaccgggttatttacatatgcgggatctggtaggcgaacgtgacaacgtcgtattttcttgtggcgtgcatccactcaaccagaatgatccctacgatgtagaagatttacgccgtctggcggcagaagagggtgttgtagcgctgggtgaaaccgggctggattattattacacgccggaaactaaagtacgtcagcaagagtccttcatccatcatatccagattggtcgtgaactgaacaagccggttatcgtccatacccgtgacgcccgtgccgatacgctggcaattctgcgcgaagaaaaagtgacggattgcggtggcgtactacactgttttacagaggacagagaaacggcgggtaaattactggatctcggattttacatctccttttccggcattgtgaccttccgtaatgcggagcaactgcgcgatgctgcgcgttatgtccccctggatcggttactggtggaaactgacagtccttaccttgcgccggtaccgcatcgaggaaaagagaatcaacctgcgatggttcgtgacgttgcagaatacatggctgtgttgaaaggtgttgccgttgaagaactggcgcaggtaaccaccgataacttcgcccgtctgtttcacatcgacgcttcccgccttcaatccatccgttgaatgagtttttttaaagctcgtaattaatggctaaaacgagtaaagttcaccgccgaaaattgggcggtgaataaccacgtttgaaatattgtgacatatgttttgtcaaaatgtgcaacttctccaatgatctgaagttgaaacgtgatagccgtcaaacaaattggcactgaattattttactctgtgtaataaataaagggcgcttagatgccctgtacacggcgaggctctccccccttgccacgcgtgagaacgtaaaaaaagcacccatactcaggagcactctcaattatgtttaagaatgcatttgctaacctgcaaaaggtcggtaaaagcctgatgctgccggtatccgtactgcctatcgcaggtattctgctgggcgtcggttccgcgaatttcagctggctgcccgccgttgtaagccatgttatggcagaagcaggcggttccgtctttgcaaacatgccactgatttttgcgatcggtgtcgccctcggctttaccaataacgatggcgtatccgcgctggccgcagttgttgcctatggcatcatggttaaaaccatggccgtggttgcgccactggtactgcatttacctgctgaagaaatcgcctctaaacacctggcggatactggcgtactcggagggattatctccggtgcgatcgcagcgtacatgtttaaccgtttctaccgtattaagctgcctgagtatcttggcttctttgccggtaaacgctttgtgccgatcatttctggcctggctgccatctttactggcgttgtgctgtccttcatttggccgccgattggttctgcaatccagaccttctctcagtgggctgcttaccagaacccggtagttgcgtttggcatttacggtttcatcgaacgttgcctggtaccgtttggtctgcaccacatctggaacgtacctttccagatgcagattggtgaatacaccaacgcagcaggtcaggttttccacggcgacattccgcgttatatggcgggtgacccgactgcgggtaaactgtctggtggcttcctgttcaaaatgtacggtctgccagctgccgcaattgctatctggcactctgctaaaccagaaaaccgcgcgaaagtgggcggtattatgatctccgcggcgctgaccagcttcctgaccggtatcaccgagccgatcgagttctccttcatgttcgttgcgccgatcctgtacatcatccacgcgattctggcaggcctggcattcccaatctgtattcttctggggatgcgtgacggtacgagcttcagccacggtctgatcgacttcatcgttctgtctggtaacagcagcaaactgtggctgttcccgatcgtcggtatcggttatgcgattgtttactacaccatcttccgcgtgctgattaaagcactggatctgaaaacgccgggtcgtgaagacgcgactgaagatgcaaaagcgacaggtaccagcgaaatggcaccggctctggttgctgcatttggtggtaaagaaaacattactaacctcgacgcatgtattacccgtctgcgcgtcagcgttgctgatgtgtctaaagtggatcaggccggcctgaagaaactgggcgcagcgggcgtagtggttgctggttctggtgttcaggcgattttcggtactaaatccgataacctgaaaaccgagatggatgagtacatccgtaaccactaatccgtaagacgttggggagactaaggcagccagatggctgccttttttacaggtgttattcagaattgatacgtgccggtaatgctgaaattacgcggtgtgccgtagacgatagaaccttccacgttggtatcgtaggttttgtcgaacaggttattgacgttcccctgtaagctgaagtttttcgtcacctggtagcgggtgaagagatccaccagcgcgtagctaccttgctcggcgcggaaggtgccatacggcgtcacggtgtcggtatacacgcgattttgccagttaacaccaccgccgaccgtcaactctggcatgacaggcaaccgatagctggtgaacattttaaccgtggtgcgtggcagattaggattaacggcgtttccttcgttatcctctgcaatatagcgcgttgcgccaaatgtcagctgccagttgtcggtaattgcgccgttgagttcaaattccacccctttactgactgtcccatccaccgctttataggcggtttcgccgttgctgccggggataggtgtaccggtggactgagcgacattatcctgctcaatacggaagatggctaacgtggtggtcagacggctattcatccagtcgcttttcagacccagctcgtagttgttaccggtgattggagccagatatttgccactactgtcacgatcattttgcggctggaaaatagaggtatagctggcgtaggtgctccagttgtcattgatgtcaaacaccagaccagcgtaaggcgtggtgtggtttttctccatgctgtaagtcagcgtatcaacccgccagttggtataacgtgcgccgaggatcagatgcagcggatcggcaagggtgacacgagtggcagcatataagcttttcatatgtgtggtatcgtcctgcgccaggctctgtggactccagtcggtttgtgggaaattgccattaaagttgtagaaactgccaatttcatccgggaagatgttggcccaactactgaagtaacgattgttttgtttgctgtaactgccaccaaacattagattgtgctgacgaccaaacaattcataactaccgtcagcgaacaaatccagcgcatcaactttacgtttgccactgttccaaccggtgccgccgacataatcaaagccaggtccataattactgtatggcccaaccagcataccatccgctttgtttacataggcatcgacatacatcattttgctgtcaaattcgacttcagagtgggtggcattcagtgtcgcttgccaggtatcagcaaactgctgcttcagggtcataaagaccttgttgatctctttatcgttgtacgcccagtcaggtgcggtactgcgtgcgcgatcgtaactgttgctgctgccatcagtattccagcgcggtaaaccgccccaggtagggctattaacatcaatgcgctgatattcgtaaccggcactaagcgtcgtaagatcgcctaaatcagcatcgacaatgccgctgaagaaggtcttttcactgttgtagcggtccagccaactgtcgttattctggtagccgccgacaattcgcgcgcggattttaccgtcttcggtgagtgggctttgtaaatccgccacataccgttctttgttccagctaccgtattccgcgctgacatcgcctttaaattcacgactggtcgcgtgttttcgaaccatattaattgccgcagatggattacccgtcccggtcatgagtcctgtcgcgccacgcactacttctacgcgttcaaagagtgccatatcagaaagtgcgtcgcccagattccagcggctttcaaaataggtggggataccatcaaccatatagttatcgatctggaatccgcgggaataataaagagcacgatcggaatccgcctgacttttgctgatccccagcgtgttttccatcacttcgcccagcgtttgtaactgctgatcttccatccgctgctggctaacaatagtgacgctctgaggaatatcacgttgagtcatctgcattttggtacccgcagaggtagacgttacgctgtaatcattttcgccatcatctggagctgtggcactaccctcaacaatcaccgtttcttcagtggctggtgcagcaaaagcggcagaaggtaatagtgccagtgctatgcaaccggcaagtagactcggtttggtgatggcttgatattgattatccctgttaaattgtgtactaagcatttgaaatctcttggtttatgttgtcgtcaggctcatgccggaggagggtgatgagcgattatatttagtgtgcgaataattttgtttgtaaatgcaaatgagaaatatacgcattcatatttgtcatgtaaaccaaacagagaatgtcttttcagcgcattcgcaggcagaaatgggaataatggcgatatatacggcagcaaaacgattttttgcttaagaaatcgtgagttaaggttgaaagagcaggtttaactcgaccatactctatactcgcagtgtggcgcggcgtagcatggcgcaacgcatggctatttgaaaaaggaaaatgtcgtggcagaagaaactatattcagcaaaattattcgtcgtgagatcccctccgatatcgtctaccaggatgatctggtaacggcgtttcgcgatattagcccgcaagcgccaacgcatattctgatcattccgaatatcctcattccgactgtgaacgacgtcagtgctgagcatgagcaggcgctgggacgcatgatcaccgtagcggcaaaaattgctgagcaagaaggtattgccgaagatggctatcgtctgatcatgaataccaaccgccatggcggacaagaggtttaccacatccatatgcacttgttgggtggccgtccgctgggaccaatgctggcgcataaaggtctgtaacgatgagaaaaggatgctttgggctggtgtctctggtgttgttactgctggtgggctgtcgtagtcatccggaaattccggtgaatgatgagcaaagcctggtgatggagagttctttattggctgcgggcatcagtgcagaaaagcccttccttagcacgtctgatattcaacctagtgcatccagtacgctttataacgaaaggcaagaacccgttaccgttcattatcgtttttactggtatgacgccagagggctggagatgcatcctctggaaaggccacgcagcgttaccattcccgcacatagcgcggtaacgctgtacggcagcgccaattttctgggggcgcacaaagtcagactttatctatatttgtaaggggtgaatcttgatgacaaaaatgagtcgctacgccttgattaccgcgctggcgatgtttctcgccgggtgtgtggggcaacgtgaacctgcaccggtagaagaagtgaaaccagcgccggaacaaccagccgagccacaacagcctgtccccacagtgcccagcgtgccgacgatcccgcagcagccaggcccaattgagcacgaagatcaaactgcaccgcctgcgccgcatattcgccattatgactggaatggcacaatgcagccgatggtcagtaagatgcttggggctgacggggtgactgcgggtagcgtcctgctggttgatagcgttaacaaccgtactaacggtagcctgaatgccgcagaagcgaccgaaacgctgcgaaatgcgctggctaataacgggaaatttaccctggtttccgcccagcaactgagcatggcgaagcaacagttaggtttgagcccgcaggacagtttaggcacccgtagtaaagccataggcattgcccgcaatgtcggcgctcattacgtgctgtactccagcgcctctggcaacgttaacgctccgaccctacaaatgcagctgatgctggtgcagacgggcgaaattatctggagtggtaaaggtgccgttagccagcaataagtaaaattatctggtcaggtaaaggtgccgtttcgcagcaataatcccatcacgcgcgacgaattgctgagccgctttttcccgcagtatcatcccgtcacgacgtttaatagtgggcttagtggcgggagttttctcattgaacatcagggccagcgttttgttgtgcgtcagccgcacgatcctgatgcgccgcagtccgcgttcttgcgccagtatcgggctttaagtcaactacccgcatgcattgcaccgaagccgcatttatatctccgtgactggatggtagtcgactatctgcccggcgcggtaaaaacgtatttgccggataccaacgaactggcaggcttgctgtattatctacatcaacaaccacgttttggctggcgaataacgctgttgccgttactggaactgtactggcagcaaagcgatccggcgcggcggacagtgggttggctgcgaatgttaaaacgtctgcgcaaagcgcgggaaccacggcctttacgcttaagtccattgcatatggatgtccacgccggaaatttagtgcatagcgcgagtgggttaaaactcatcgactgggagtatgccggagatggtgatatcgcgctggaactggcggcggtgtgggtggaaaatactgaacagcaccggcaattggtcaatgactatgccactcgcgcgaagatttatccggcgcaattatggcgtcaggtcaggcgatggtttccctggctgctgatgctcaaagcagggtggtttgagtaccgctggcgacaaaccggcgatcaacaatttatcaggctggccgatgacacctggcggcagctattaataaaacaataaggagagcagtgtgggtccagtaatgttggatgtcgaaggttacgaactggacgcggaagagcgtgaaatactggcgcatccgctggtgggagggctgattctctttacgcgtaactatcatgatcctgcccagttacgtgaactggtgcgccagatccgcgcagctagccgcaatcgtctggtggtggcggttgatcaggaaggtggacgcgtgcagcgttttcgtgaaggttttacccgcttgccagcggcgcaaagtttcgctgcgctgagtggaatggaagagggtggcaaactggcgcaggaggcaggttggttgatggccagcgaaatgatcgctatggatattgatatcagctttgcgcctgtgctggatgtcgggcatatcagcgcggcgattggcgagcgttcttatcatgccgatccacaaaaagccctggcaattgccagccggtttattgatggtatgcatgaagccggaatgaaaacgaccgggaaacacttcccaggacacggtgcagtaacggcagacagtcacaaagaaacaccgtgcgatccacgtccacaagcggagattcgcgctaaagatatgagcgtcttcagttccttaatccgcgaaaataaactcgacgccattatgcctgcgcatgtgatctacagtgatgttgatccgcgtccggcgagcggttctccctactggctgaaaaccgttttgcgtcaggaactgggttttgacggcgtgattttctctgacgatttaagcatggaaggtgccgcgattatgggcagttatgccgaacgcgggcaggctagtctggatgcgggttgcgatatgatcctggtctgcaataatcgtaaaggggccgtcagcgtgttagataatctgagtccgatcaaggcagaacgtgttacacgtttgtatcataaaggtagttttagccgacaggaactgatggacagcgctcgctggaaagcgatcagcacccgtctgaatcagttacatgaacgctggcaggaagagaaagcaggtcactaaccctggcttatgtgaggaagcgatgattatctatttacacggttttgactctaacagtccgggtaaccacgagaaagtcttacaattgcagtttattgacccggatgtacgcttgataagctacagtacgcggcatccgaaacatgatatgcagcatctgcttaaagaagtggacaaaatgttgcaactgaacgttgacgagcgtccgctaatttgcggcgttggcttgggcggatactgggcggaacggattggttttctttgcgacatccgccaggtgatcttcaaccctaatttgttcccttatgagaacatggaaggcaagattgatcgcccggaagagtatgccgatattgccactaagtgtgtgaccaacttccgtgagaagaatcgcgatcgttgcctggtgattttgagccgtaatgatgaagcgcttaacagccagcggacatctgaagagttgcatcattattacgagattgtctgggacgaagagcagacgcacaaattcaagaatatctccccgcatttacagcgcattaaagcgttcaaaaccctcgggtaaatgccctcgtcgcatcaggtaaccttgccggtacctgatgcgctccgaattctgtgggtcggataaggcgtccacgccgcatccgacagtcgagcatcaatgcctgatgcgcttcttatcaggcctaccgaacgccctgcatacacccctcactctatatcactctcacaaattcgctcaaataataaacaataaactctgttttttgatctcacccggtaaagtcgcctatcttttcagcaacaaaacttgattaacatcaattttggtatgaccaatgcaccattcatgttattctcaatagcgaagaacattttcattgctgtaacctgttgttaattaagagctatgttaataaccattaattaacaattggttaataaatttaagggggtcacgttgactacgccattgaaaaagattgtgattgtcggcggcggtgctggtgggctggaaatggcaacacagctggggcataagctgggacgcaagaaaaaagccaaaattacgctggtcgatcgtaaccacagccacctgtggaaaccgctgctgcacgaagtggcgactggcagccttgatgaaggcgtcgatgcgttgagctatctggcccatgcgcgcaatcatggtttccagttccagctgggttccgtcattgatattgatcgtgaagcgaaaacaatcactattgcagaactgcgcgacgagaaaggtgaactgctggttccggaacgtaaaatcgcctatgacaccctggtaatggcgctgggtagcacctctaacgatttcaatacgccaggtgtcaaagagaactgcattttcctcgataacccgcaccaggcgcgtcgcttccaccaggagatgctgaatttgttcctgaaatactccgccaacctgggcgcgaatggcaaagtgaacattgcgattgtcggcggcggcgcgacgggtgtagaactctccgctgaattgcacaacgcggtcaagcaactgcacagctacggttacaaaggcctgaccaacgaagccctgaacgtaacgctggtagaagcgggagaacgtattttgcctgcgttaccgccacgtatctctgctgcggcccacaacgagctaacgaaacttggcgttcgcgtgctgacgcaaaccatggtcaccagtgctgatgaaggcggcctgcacactaaagatggcgaatatattgaggctgatctgatggtatgggcagccgggatcaaagcgccagacttcctgaaagatatcggtggtcttgaaactaaccgtatcaaccagctggtggtggaaccgacgctgcaaaccacccgcgatccagacatttacgctattggcgactgcgcgagttgcccgcgtccggaagggggctttgttccgccgcgtgctcaggctgcacaccagatggcgacttgcgcaatgaacaacattctggcgcagatgaacggtaagccgctgaaaaattatcagtataaagatcatggtagcctggtaagcctgagcaacttctccaccgtcggtagcctgatgggtaacctgacgcgcggcagtatgatgattgaaggacgaattgcgcgctttgtatatatcagcctataccgaatgcatcagattgcgctgcatggttactttaaaaccggattaatgatgctggtggggagtattaaccgcgttatccgtccgcgtttgaagttgcattaatcgacgtacactggcggatgtggcataaacgcctcatccgcccttgaggaacagcgcgatcggcagccgcgttgtatcaggcatcctttcagactcctccgaatccttaagtatttccagccattcccgcgcttttcatcttctgtctgatagctgcttttctccttcgcttgcatgattggcataactgcaaagaaggaggtgttcccgtaaataaaagtatgttggcgggtatcgggattggtgtcgcagctgcgctgggcgtagcggcagtggccagtctgaacgtgtttgaacggggcccgcaatacgctcaggttgtttctgcaaccccaatcaaggaaacggttaaaacaccgcgtcaggagtgtcgcaacgtcacagtgacccatcgtcgaccggtgcaggatgaaaatcgcattaccgggagcgtgctcggcgctgttgctggcggcgtgatagggcatcagtttggtggtggtcgcggtaaagatgtcgccactgttgtgggggcgctgggtggtggatatgccggtaaccagatccagggctctctccaggaaagcgatacttacacgactacgcaacagcgttgtaaaacggtgtatgacaagagtgaaaaaatgctcggttatgatgtgacctataagattggcgatcagcagggcaaaatccgcatggaccgcgatccgggtacgcagatcccgctagatagcaacgggcaactgattttgaataacaaagtataacaaggctgtactctgcaatttggcccctcattcgctcaggctgaggggctttttttgcgacttatttcaccagttcgggccataaacgcaaagtcgttccggcaatctgcatcagtttttccaggcttgcaccttcgcgtgcgctgatgctcatcccctgaataatacaattaaggaattctgccagatgtgtcacgtcacagtggggcgggatttccccgcgcgcttgtcgttgacataaaaactgctgcaaagtgcgctcttgcatcgcatggcgacttttcaacgtattggcgatatctccactatctggggagagggtggtgcagttgttgatcatgaagcagcctgccggggtgtctttgctggtaaagcagttggcgatggcagcaaaatagtcagccagcgcagactccacgcttttctcttcacaaaacagctgtgcttcatgcttagcggcaaaacgatcgatatagcggtcgagaacggcacgaaataacccctctttgttggtaaattccgcgtatagcgtgggcgctttggctccggtcgcttcgacgaggtccgcaagagaagtcgcttcataaccgtgttgccagaacaatttcatggccttatcaagcgcggcatccctgtcgaacacttttgggcggccacggcttttttttacacattgtgtactgtcagttgccatgatgccgttgtacctggtgactgtgaatgaaaggttattataaaaataatcacctccgttcaccagtccagatcccataaaaataattgctttctatttaactgaaatttaaagatttttaaattaattaatgattgttataaaaaatatcttgtatgtgatccagatcacatctatcatttagttatcgatcgttaagtaattgcttgcgacgtcattcatctgcataaggccactattatgaaaaacgtaaaaaccctcatcgctgcggcgattttaagctccatgagttttgccagctttgcggctgtcgaagttcagagtacgccagaaggccaacaaaaagtcggtacaatcagtgctaacgcggggacaaatctgggaagcctggaagagcagctggcgcaaaaagcggatgagatgggcgcaaaatctttccgtattacttctgtaaccggtccgaataccctccatggaacagcagtaatttataaataagcattaaccctcattaatgcctgctactgctgattttttccccgcgacatgccgtgtcgcggggatttttttatccgggctttacagcgtttgtgggctcacttgatgacggcggacatccaccggcatcccggaacggacatccatcacatgttgcatcacttcagcgtcagtttgtgctgcatctttaaaactttgcattgcgctattcagcgtaattggcagcagctgcggatcgtcatcaatcttctcactcagcggctgatgtacttcaaccagacgcgcaccgtttggttcggcagagacttttatcggagtgttgatgatattcactttggtgcctggggtgacctggctaaagagtgttttgatatcgtcatcccgcagacgaatacagccagaacttacccgcatgccaatgccgaaatcggcgttcgtaccatgaagcaaataaacgccgccataggccgccagacgaatcgcatgatggcccattgggttatccagtccagccggcactaccgcaggcaactcaattccctgtgctttataacgggcgcggatgtttgccgttggcgtccaggttgggtttgcacgtttgtcactaacggtggtcaccattgtcggtgtcagcgtgtcaccacctaactgaccaatacctattggatacacggttacgctatttttacccggcgggtagtaatagagacgcagctccgcaatgttgatcacaatgccttcgcgcggcgcatctggaagtagggtttgcaacgggatcgttaacacgctgcccgcgcgcggtacgtaaggatcaacgccggggttagcctgtaacagagcgagaaagccgacgttgtattttttggcgatggcttccagagaaccaccgtcattttccaccacatgaaatttgttttcgccaaccagacgactgcccgctggcggcagcggccaggtgttggcttttgccggtagcgccagcgccacggcagcggcgaacgtaaaaaacgttagccagcgagaaaaacgcgttttgatcatcaccaaaaatccataataaatataaggttattgtaataaacagataagcctgaattatggatggtgacagtgtcggatagtgcagggaagtgcaaagaatttgtaaatgttgcagatgggggcgcagaaacgcccccgatttaccattaagcgatcgcgttctcttccagttcacgcataaactggcgtacccattcgatacgcgttttccgctcactcaaatcctgaataaatttcaggcgcgtcggaccatcaaggcggtaatgctgcggctgtttttgcagcaaaccaatcaaccaggccggattaacgtgattcttctcggcaaattcgatcaccccgcctttctcattaccttccagcttcctgatccccagtttctgcgcttgctggcgcagacgggcaatatccagcagggtacgcgccggatctggcagcaggccgaagcgatcgataagctcgactttgatctcttccagttcgttttccgttttggcgctggcaatacgtttgtagaagctcagacgcgtgttcacgtcagggatgaaatcatctggcaataggctcggcatccgcagctcgacttctgtttgctggctggtgagatcttccaggctcggctcgcgtccggctttcagtgcatcgacggcgttttccagcaactccatatacaggctgaaaccgatggtttccatactgccgctttgttcttcgccaagcagttcacccgcgccgcgaatctccagatcgtgcgttgccagcgcaaaacctgccccgagatcttccaggctggcaattgcttcaagacgtttttgtgcatcggtagtcatcgcttttggatgcggtgtcagcaaccatgcatatgcctgatgatggctacgtccgacgcgaccgcgtaactggtgcagctgcgccagaccgaagtgatccgcgcgttcaatgataatagtgttggctgtcgggatgtcgatcccggtttcgataatggttgtacaaaccagcacgttgaaacgttgatgatggaaatcattcatcacccgttccagttcgcgctcgcgcatctgcccgtgaccgatggcgatccgcgcttctggcaccagttctgccagccgttcggcggctttctgaatgttttccacatcattgtagagataataaacctgtcctccgcgcaaaatttcacgcaggatcgcctcccggaccaccatgctgtcatactcacggacaaaggttttaactgccagacgacgggcgggcggcgtggcgataatgctcaggtcacgcattccgctcattgccatattcagcgtacgtgggatcggcgttgcagtaagcgtcagaatatccacgttcgcgcgcatcgctttaatgcgctctttatgacgcaccccgaagcggtgttcttcatcgacaatcagcaggcctaaatctttaaacttgacgtcactttgcagcagtttgtgcgtaccgatcagaatatcgattttcccttccgccacttccgcaaggatttgcgtctgctctttggcgctgcggaaacgggagatcatttcgatacgtaccggccagttggcgaaacggtcgcggaagttgtcgtaatgctgctgcgcgagaagggtggtaggcaccagcaccgccacctgcttgtggttatctactgccaggaaagctgcgcgcatcgccacttctgttttaccaaagccaacatcgccgcacaccagacgatccattgccagcggctgacacatgtcgctaagtaccgcattaatggcctgcgcctgatccggcgtggtttcaaacgggaagctgtcgcagaacaactgatactgctcacgatcgtgtttaaacgcgaagccctctttggcggcgcgttgcgcgtagatatccagcaattccgccgccacatcacgcactttttccgccgctttctgccgcgcgcgactccacgcatcgccgccaagtttatgcagcggggcgttttcttccgcgccacctgcgtaacggctaatcagatgcagactgctcaccggaacatacagtttggcgtcgttggcataggtgagcatcagatactcgccagtaatgccacccgcttccagcgtggtcattccggcataacgaccgacgccgtgctccagatggaccaccggctgaccaatatgcagttccgcaaggttacggatcagtgtatcggggttgatggtgcggcgagaatcctgacgacgacgggcaacgcgttcaccgagcagatcgctttcgcaaatcagcgccagattacgcaccgtatcgacaaaaccatgttcggcagcgccaatcatcagataacgcccacggtcgctggcttcatcaagacgcataatgcgttgcggagcaattttaattcgtgcgagcagttcacccagcgcttcacggcgaccttcactttctacgctgaacaccaccggaccgtcgaaagtctcgaggaacttacgcagcgcatccagcggcgctttttgttgtgcctgaacggccaggtctggcagtttctggaaacctaaattggcattcgcggcttttgtcggtaaatgttcagtttttagctgcacccggggccagtttttcagctcactgaagagctcgtccacccgcagccagaggctttgtggtggcaacagcgggcgcatcggatcgacgccgcgattctcaaaacgcgccagcgtgtcagcctggaaacgttcggcactggtttccagatcgccagtattcacgagcaaggtattggcagggaaataactgaacagcggcggcagtggttcgctgaagaacaatggctgccagtactcgatcccggcaggtaatgtgcctttactcacttgctggtaaatatgttctggatcgcgcttcacttcgaaggtatcgcgccactggctgcggaacagttcaattgccgctttatcggtcggaaattcgtgcgcgggcagcagattgatcgcttctacttcctccagcgtgcgctggctgtcgacgtcaaacacccgcaggctgtcgatttcatcatcaaagaaatcaagacgataaggcagctcactccccatcgggaagagatccagcaacgcgccgcgcgtggcgtattcgccgtgctccatcacctggtcaacatggcgataaccggcgctgtccagttgggttcgtaatgcatctcgactcaggcgctgaccttttttcatcaccagcgcatgaccgtggagaaaactgtgtgggcaaacgcgctgcataagcgtattcaccggaacaatcagtacgccacgctgcatcgtcggtagctggtaaagggtggaaaggcggctggagataatgtcctgatgagggctaaaactgtcgtagggaagagtttcccagtccgccagattcatcaccatttgatcggtaaactggctgatttcatcatgcaaacgcagagcattttgcatatctggtgcaatgagtaccaccggaccggcgtgacgttcggcaatttccgctaccagcgttgcacaggctgcgccggttaactcgcccagcagacgctgctcacccgctttgacgggcagcgtataacgatattgttcaggcataacggttgtcagattctcgttaggatatgcctcaacatatgggggcatatctctgataagcaatgctgttcattatccgtaatcgacatggtttagcaaattgaatcgccccggctggggcgatggcttagcgggagtaactgacggcagcgggcagactaggcggggagaacaacagatcgctgaatgcacgctgactaagttttcttaccagcaagcccgcaacagtacagatgaacaaactgacaaagggataaaccagcaggagtgtcagttcgacttgcgggctccagcgtgctgcgttcatttgcgcaagcagagttaagctgaatatttcaaccagaatgcgatgggtggtgtagatagcaatggtgttggagccaatcacattcagcaggctggtggagcgcataccgaatcgttgctcgtattgataaaacagcttcatgatcaccacaatgcttaccaggctcaacagcaggctgatagtaaacaaccaggcaccgaccgccagaacggtaagcaaagaagccatcagcagatggcggcgcaacggcacctctttaacacaggtcattattgttgcgccaaaccatgcgccaaggctgtaataaggcaaattgcggatcacactgttcattccccaccacggcgtgggaacgaaattaaccgccacactcagcagtacaaacaaggcgaatagtggcagcgccagacggctaaaaattttacataccacgaaatagacaattaacgcatacagataccacaagctggtgctggcggtgatcatcccgtgcaggaactcaccggtggaatcggcataagcggcattggaggcattgcttaaatcgcgctcaggtgccagccactggttcagcgcacttaacgccagccactgcaccacgccccaaagcgccagcacccagaagatgttccagatccgtttatcgagacaatttccccacggtacgctgtcgatatagcggcgaatcaaatagccggatataaagaaaaaaaccggcatacgaaagggggcaaggtaaagattgaaatagatccagcatttgctcaggacttcgcttaacggatgctgaaaagtggtcagatgcggataaaaggtaatgacgctgtgataaatcaccaccagacaaatacataaccctttgatctggttaatccatagctctttttgtttcatcaggacaacacgctcttttttaatttacatgcggttgatcctgcgggttatgacccgaggtgtaatgggtatctgtctgtattggatgatttttcagattaagatcaggcggcaagattgatgataaaacatggcaatttagccgattgatttacgggggcttttcagattagccctgacgatcacttacagttcagacgtttacccatcttgctttcgcttatatactcgtgtctttgctacagcaaccagacggatttcatgtaccaacctgtcgctctatttattggcctgcgttacatgcgtgggcgtgcagcggatcgcttcggtcgtttcgtctcctggctttctaccatcggcattaccctcggggtgatggcgctggtcacagtattgagtgtgatgaacggctttgagcgcgagctgcaaaacaacatccttggcctgatgccacaggcaattctctcttctgagcatggctctcttaacccgcagcaactcccagaaacggcagtcaaactggacggcgttaatcgcgtcgcacctattactaccggtgatgtggtactgcaaagcgcgcgcagcgtggcggtcggggtgatgctcggtatcgacccggcgcaaaaagatccacttacaccgtatctggtcaatgtgaaacaaactgacctcgagccggggaaatataatgtcatcctcggcgaacaacttgccagtcagctaggcgttaatcgcggtgatcaaatccgcgtgatggtaccatctgccagccagttcacgccgatggggcgtattccaagccagcgcctgttcaatgtgattggcactttcgccgccaacagtgaagtcgatggctatgaaatgctggtgaatattgaggatgccagccgtctgatgcgttatccggcaggcaatattaccggctggcgtttgtggctggatgagccgctgaaagtcgacagtttaagtcagcaaaaactgcctgaaggcagcaaatggcaggactggcgtgatcgtaaaggcgagttgttccaggccgtacgcatggaaaaaaatatgatgggtttactgctgagcctgattgtcgccgttgcggcgtttaacattattaccagtctagggctgatggtaatggagaagcagggcgaagtagcgatcctgcaaacgcaaggcttaactccgcgacaaatcatgatggtctttatggtgcaaggggccagcgccgggattatcggtgcgatcctcggagcggcgcttggcgccctgcttgccagccagttaaataatctgatgccgataatcggcgtcctgcttgatggcgcggcgctgccggtggctatcgaacctttacaggtcattgttattgcgctggtggcgatggctatcgcgctgctgtctacgctttaccctagttggcgcgctgccgccactcaacccgctgaggctttacgttatgaataagatcctgttgcaatgcgacaacctgtgcaaacgctatcaggaaggcagtgtgcaaaccgatgtgctgcacaatgtcagtttcagcgtcggcgaaggtgaaatgatggcgatcgtcggtagctctggttccggtaaaagtaccttgctgcacctgctgggcgggctggatacgccaacctccggcgatgtgatttttaatggtcagccaatgagcaaactgagcagcgcagcgaaagctgaactgcgcaaccagaagctgggctttatttatcagtttcaccacctgctgccggattttaccgccctggaaaacgtggctatgccgctgctgattggcaagaaaaagcccgctgaaatcaacagccgtgcacttgagatgttaaaagcggtggggctggatcatcgtgcgaatcaccgcccatctgaactttctggcggcgaacgccagcgtgtggcgattgcccgtgcgctggtgaataacccgcgcctggtactggcggatgaacctaccggtaacctcgatgcgcgtaacgccgacagcatcttccagttgcttggggaattgaatcgcttgcagggcaccgccttcctggtggttactcacgacctgcaactggcgaaacgtatgagccgccagttagaaatgcgtgatggtcgtctgacggcggaactgagcctgatgggggcggagtaatggcgatgcctttaagcttattaattggcctgcgttttagtcgcggacggcggcgcggcggcatggtgagcctgatctccgttatttctaccattggcattgccctcggcgtggcggtattgatcgtcggcttaagcgcgatgaacggctttgaacgcgaactgaacaaccgtattctggcggtggtgccgcatggtgaaatcgaggcggtggatcagccgtggactaactggcaggaagcactggatcacgtgcaaaaagtgccgggtattgccgctgccgcgccgtatatcaatttcaccgggctggtggaaagtggcgcgaatcttcgcgcaatccaggtgaagggcgttaacccgcaacaggaacagcgtctgagcgcattacccagctttgtccagggcgatgcgtggcgcaattttaaagcgggcgaacagcaaattatcatcggcaaaggcgtggcggatgcgctgaaagtgaagcagggggattgggtgagcattatgatccccaacagcaatcccgagcataaactgatgcagccaaaacgtgtgcgtttgcacgttgccggtattttgcagttgagtggtcaactcgatcacagttttgccatgatcccgctggcggatgcccaacaatatcttgatatgggttccagcgtgagtggtattgcccttaaaatgacggatgttttcaacgccaataagctggtacgcgatgcgggtgaagtgaccaacagctatgtttatattaaaagctggattggtacttacggctatatgtatcgcgatatccaaatgatccgcgccattatgtatctggcgatggtactggtgattggcgtggcctgtttcaacatcgtctccaccttagtgatggcggtgaaagacaagagtggcgatatcgcagtattaagaacgctgggggcgaaagatggtttaattcgcgccatctttgtctggtatggattgctggcagggctgttcggcagcctgtgtggtgtgattatcggcgtagtggttagtctgcaacttaccccgattattgagtggattgaaaagttgatcggtcatcagttcctctccagcgatatctattttattgatttcctgccaagcgaattgcactggctggacgtcttctacgtactggtcacagcattgttgctgagtcttttggcaagttggtatccggcgcggcgcgccagtaatattgaccctgcgcgagtccttagcggccagtaaaggcagtacattaaaacaaggagcggcaatgtattacgggtttgatattggtggaacaaaaattgcgcttggcgtgtttgatagcggtcggcagttgcagtgggaaaagcgggtgccgacaccgcgtgacagctatgacgcatttttagatgcagtgtgtgagctggtagctgaagctgaccaacgttttggctgtaaaggttctgtcggcatcggtattccgggaatgccggaaacagaagatggtacgctgtatgccgccaatgtccccgctgccagcggtaaaccgctgcgtgccgacctgagcgcacgtcttgatcgcgatgtacgccttgataacgatgccaactgttttgcccttagtgaagcctgggatgatgaatttactcaatatccactggtgatggggttgattctcggcaccggtgttggcggcgggctgattttcaacggcaaaccgattaccggtaaaagctacattaccggcgagtttggccatatgcgtctgccggttgatgcgttaaccatgatggggttggatttcccgttacgccgctgcggctgtggtcagcatggctgcattgaaaattatctgtctggtcgcggttttgcgtggctgtatcaacactattatcatcaaccgttgcaggctcccgaaattattgcgctttatgatcaaggcgatgagcaggcaagggcgcacgttgagcgttatctggatttattagcggtttgtctgggaaatatcctgaccatcgttgaccctgacctggtcgtcattggtggtggcttaagcaatttcccggcaatcacaacgcaactggcggacaggctgcctcgtcatctcttacctgtagctcgtgttccgcgcattgaacgcgcgcgccacggtgatgcgggaggaatgcgtggtgcggccttcctacatctaaccgattaaacaacagaggttgctatgctgagccgtcggggtcatcggttaagtcgttttcgtaaaaataaacgccgcctgcgcgagcgtttgcgtcagcgtatttttttcagagataaagtggtgccggaagcaatggaaaaaccaagagtactcgtactgacaggggcaggaatttctgcggaaagtggtattcgtacctttcgcgccgcagatggcctgtgggaagaacatcgggttgaagatgtggcaacgccggaaggtttcgatcgcgatcctgaactggtgcaagcgttttataacgcccgtcgtcgacagctgcagcagccagaaattcagcctaacgccgcgcatcttgcgctggctaaactgcaagacgccctcggcgatcgctttttgctggtgacgcagaatatcgacaacctgcatgaacgcgcaggtaataccaatgtgattcatatgcatggggaactgctgaaagtgcgttgtagtcaaagtggtcaggttctcgactggacaggagacgttaccccagaagataaatgccattgttgccagtttccggcacccttgcgcccgcacgtagtgtggtttggcgaaatgccactcggcatggatgaaatttatatggcgttgagcatggccgatattttcattgccattggcacatccgggcatgtttatccggcggctgggtttgttcacgaagcgaaactgcatggcgcgcacaccgtggaactgaatcttgaaccgagtcaggttggtaatgaatttgccgagaaatattacggcccggcaagccaggtggcgcctgagtttgttgaaaagttgctgaagggattaaaagcgggaagcattgcctgatgcactacgcttatcaggcctgcaaggggacgcaattaattgaatttgcgggttttgtgggccggataaggcgttcgcgccccatccggaataatacacgcgcacttttccggcctcttttatcgtttactcgtcaataacaatgcggcaataaacgtacagacaccaattagccctgcccagagtgggcttattctggtaatcgcaaagctattatcgatatacaaacataaagcctgataacccatattggcaatagtcatcgccactgcaaattttaacgcataaataaaacgagtcgtgtagtaaaagatcctggaaaataagataaacgtcgcagcccaggcgataaaacctaatgtgttggtgctgccggggggagcattttcatgctgttgtcctggatgcggataatacgttagtggcggcgtgctttgttttaatatctgtgcttgtagaacagccaatgcattattgattccctgataccagagatctgcatttaaataagccagcgtgtgattttctatcagaaggccgagatgtttatcgtccagaccactttcaacctggccgttggtgatcataattaaccgtggttcgcgggtagtaaatagtaacagaacacttccttttacatcactcaaactagaactcgcatgcgccagcatcgctttaccattttgtctgagactggcttcattattaatgtcgggtaaaaccacaataaacggtgcaattcccgtttgttggcgaaaaagctcggctttatgcgcgatctcttcagcatctggtacagtaccggtaacgtccgtaaaaagtgtcttcattattggaattaatggcttgctggctgctgtcagaggcaggagtatcagtaaactgagcagtataatgaattttttcatgggcgggacttccgtttcctgcgactttttttagaggagggcatacttattaataaaccgacggcgataaaaataacgcccataatgccgataaacccccatttaaaaaaattaacccacgggttatttatctcagccttttcaggatgcccgggagaataataaacattaactttatcgccttcgctgtcttcataaaaatcgctgccgatactgctattgaaaattagcgtgtaatctggcgtcggtcgaaaggcaacgacgggataccagctaccatctttacccgtgcgatgagaatgactggagtgccagacggtatcaacaatgacgccttcggtatgaatcgcgtctttgctataggtgaactggttataaaagacaacaacagaaatgaggatcagtaccagaccgataccgaggaatatacgaaagaaaactttactgtcctgactcattagccacatccttgctaactaaaaaacgggcggtaataccaccgcccgcttgctgaattaacgtcctgctttcagcttctgataatactcttcataaatgctgctggctgcgccaacgtcattctgccattcgccatttttaatggtttcagcatccgggtagagtgttttatcgttcgccacttctggacttaacagcttacgcgccgcaaggtttggcgttggataaccgatagtttcagcaacctgttttgccacatccgggcgcagcaggaagttgatcaatttcagcgcgccttctttgtttttggcatttgccgggatcgccaggctgtccatccagaaaatgccgccttctttcggccacaccacgtcaattggcgtacccgcctggcgtgcaacgaaagcagaaccgttccagatcatgccgaggttaacttcgccttccatgtacgggttcgccgggttatcggagttaaaggctgccacgtttggcatcagttttttcagctcgttatatgcagcttcaatctctttcggatcggtggtgttaccggagtagcccagcttacgcagcgccatctggaacacttcacgggcatcgtcggtcaacagcaggctgcctttgtactctggcttccacagatcggcccagctggtgacagatttcggatccaccgcatcaccgttaacaccaatcgccgtcgcaccccagatatacggaatggagtagtcgttattcgggtcaaaaggcttgttgagcatgtctggatcgagattgctgaagtttgttaacttgctcttgtcgatcttctggatcatcccttctttacgcattttatcaacgtaataggtactaggaaccaccagatcataggcaccgtctttgtatgttttcagcttggcgtacatggtttcgttgctctcgtaagtgctatagataaccttaataccggtttctttggtgaactgttcaagcagtcctggcggcacgtactcggtccagttgtagaaatacagcgtgttgttgtcatcggcgtgagcggcgctcatgcccagtgccagagcacccgccgcgagcaggtggcgactccattttttcatttaacgtcccctgtgttacctttcgttttatcacgagcaataagctggctggcaataaccatcaccaggctcagcaccagtaatatggttgccagcgcgttaacttccgggcttacgccgactttgaccatgctataaatttttaacggcagaatttcataacttggtccggtgacgaagctagaaactaccacatcgtccatgctcagggtaaagcttaacacccagcccgccgccaccgctggcattgccagtggcagaatgatttttcgcagaatggtaaattcgctggcaccgagatctttcgccgcttccagcattcgcacgtcaaaacctttcaggcggctatacaccgtcaccaccacaaatggcaggcagaaggtgatatggctgaacagcaggctccagaagccaagctgaatacccagcagcataaacagcaccagcaggctaatcgccatcacgatatctggactcatcatcaccacaaacagcattccgctaacgaacggcttaccacgaaagcgataacggtacagcgcaactgccgtcagactaccgataagcgtagcaaacgtcgcgctaaacaccgccattgttagactatgctgcgctgcctgtaacaggctgtcgttgttcatcagcaggctataccatttggtggtaaagccctgccagttgatgccaaagcggctgctgttaaaggagttcacaatcaaaataatgattgggatatacaggtacgcgtagatagcggtcataaaaccgccgcgaagcagtcgaccgatcattcgagttccaccttcttattcagcaaacgagaagcgcgccagtaaaccagcaacatcaggcccattacgatagtcagcgtaatgctggtagctgcaccaaacggccagtcacgaatattaaggaactggaccttgatgacgttaccgatcagcaggtttttcgcaccgcccatcaggtcggatacatagaacaggcccatcgctggcagcatcaccagcagacatccggcaataattcccggcatcgtcagtggaataatgatacggataaaagtctgtaacttgctggcaccgagatcgcgcgccgcctcaagcaacggcttatccagtttttcgatactggagtacagcggcatcaccataaacggcagcagaatgtaaaccagaccgataatcaccgcactgggcgtgaacatgatacggattggtgtgtcgataacgcccagccagagcaaaaactcgttgagatagcctttggtgctgaggaaaattttcagcccgtagatacgaattaaactgttggtccagaacggaacaatcagcagaaacagcagcagcggacgcaccttgtgtggcaacttcgccagaaaccaggcaaacgggtagcccagcaccaggcaggcgagggtggcgatcagcgccatattcaggctgtgcaatagcacttcaaaatagagcggatcgagcagacgcgtgtagttatccagcgtaaagaccattttgacaaaactggcgtcgtcgcgggtcaaaaagctggtgccaatgatcatcaggttgggcagaaagacaaacaacacaagccaaccgacaatagtgacaatcactacattctggaacttacttgtgttcttcatcagccagtacgacctcccagctttctacccaattaatggccattttttggtcgagagagtggtcaaagtcaggatcgtcttcattgaagaattcgctgaccatcaccatcttgccattttccagttcaacaacgctctccagcgtcatgcctttgtagttacgctcgcgaacgtaaccaatcagcccttcagcgtggttgtcgtcgttaatctcttcaacacgtaagtcttccgggcgcagcagaacatgcagtttttgccccggttcaacggcgaagttaacgtagatattacattcgcggccttcaacgttggcgcgtacgcgctgctcgtctagacgttcgatgacagtggcgttaaacatattgatttcgccaatgaagccggcaacaaacaggtttttcggctcttcgtagatttcacgcggcgtgccgtcttgctcaatgcgaccatcgcgcatcaccacaatcctgtcactcatggtgagtgcttcttcctggtcgtgagtcacaaagacgaatgtaatgccaagcttacgctgtaacgctttcagctcgttctgcatttgcttacgcagtttgtaatccagcgcactgaggctctcatccagcaacaacagacgaggcttgttaaccaccgcgcgagcaatggcgacgcgttgctgttgaccaccagagagctgatgcggtttgcgttgagcgaaggtttccaactgcaccatccgcagggcttccatcacgcggggcgtaatttcagcagcgggggttttttgcatgcgcaacccaaaggccacattttcgaacacggtcatgtgggggaaaagtgcgtagctttggaaaacagtgttcacatagcggttttccgccggaacgtgggtgatgtcctcgttatccagcatgatgcgtccggaatcaacagtttccagacctgcaatcaggcgaagaacggttgttttaccgcagccagaagggccaagcagcgtgaggaactcgccattgttgatagtcagatccagctggggaatgacctctttaccatcaaagcatttgcgaattcccgccaattgcaccagcggactaaggctactcggttgtttattcaattttttactctgtcccatgtaaacgcaacggatggcttaccgatgcggggtttgtggttaaccaccttggtgactcttaatgagggcggtaattctacggcaaaccgcttgaatcgccaatctttgttgtgaattactggcttagctttatattcattaaggtaatgctgataaatattcccgcttgcaggggtaaaagtgacctgacgcaatatttgtcttttcttgcttcttaataatgttgtcacaaaaagtgagggtgactacatggataaactacttgagcgatttttgaactacgtgtctctggatacccaaagtaaagcaggggtgagacaggttcccagcacggaaggccaatggaagttattgcatctgctgaaagagcagctcgaagagatggggcttatcaatgtgaccttaagtgagaagggcactttgatggcgacgttaccggctaacgtccctggcgatatcccggcgattggctttatttctcatgtggataccagtccggattgcagcggcaaaaatgtgaatccgcaaattgttgaaaactatcgcggtggcgatattgcgctgggtatcggcgatgaagttttaagtccggttatgttcccggtgctgcatcagctactgggtcagacgctgattaccaccgatggtaaaaccttgttaggtgccgatgacaaagcaggtattgcagaaatcatgaccgcgctggcggtattgcaacagaaaaaaattccgcatggtgatattcgcgtcgcctttaccccggatgaagaagtgggcaaaggggcgaaacattttgatgttgacgccttcgatgcccgctgggcttacactgttgatggtggtggcgtaggcgaactggagtttgaaaacttcaacgccgcgagcgtcaatatcaaaattgtcggtaacaatgttcatccgggcacggcgaaaggagtgatggtaaatgcgctgagcctggcggcacgtattcatgcggaagttccggcggatgaaagcccggaaatgacagaaggctatgaaggtttctatcatctggcgagcatgaaaggcaccgttgaacgggccgatatgcactacatcatccgtgatttcgaccgtaaacagtttgaagcgcgtaaacgtaaaatgatggagatcgccaaaaaagtgggcaaagggttacatcctgattgctacattgaactggtgattgaagacagttactacaatatgcgcgagaaagtggttgagcatccgcatattctcgatatcgcccagcaggcgatgcgcgattgcgatattgaaccggaactgaaaccgatccgcggtggtaccgacggcgcgcagttgagctttatgggattaccgtgcccgaacctgttcactggcggttacaactatcatggtaagcatgagtttgtgactctggaaggtatggaaaaagcggtgcaggtgatcgtccgtattgccgagttaacggcgcaacggaagtaagcgaaaagggatgcggcatgtgatgccgcatccggcttaaatccaaacttacccttcgaagaaccaatacccgctattgaccagcgccgcgagcatcgcgaggaaactcggatcttccagcgcatcgccaaaattctccgcagtcagcgcaatgttgctggcgagtgcatccagtgccggacggtgcggggaatcgatcttctcaccattggcatacacgtcgtcgccaatgcgcaatacgcgcagaccacccaggcgcaccagcacttcaccttgtttcagcgcatcgtagatttcatccggctgataaggcggctctggcggcgcgatatccagttcatgacgactctgggatataaactcgccaaaccattgcttaaagtgttccggctggttgatcaattcgagcatcatctcacgcagtttatccatctcttgcggcagaacatccgcaggatgagcgcgaggtggaacatccggatcgctgtagtagttgccgcccagttcacgttgcagcacataatcggcaaatccactaatcagttcccgcgtatttggcgcgcgaaagcccacggaatagttcatcgcattttccagcgcgtagccttcatgcgggaatcctggcggaatataaagaatatcaccaggctccagctcttcatcgatgatggcttcgaacggatcgacctgtaacagatccggatgtgggcagtgctgtttcatttgcagcttttcgcccactcgccagcgacgacgtccggtaccctgaatgataaacacgtcgtactgatcgagatgcgggccgacgccgccgccgggtacagaaaaagaaatcatcagatcatcaatacgccagtccggtagttcacggaacggtcgcatcagcgcggcggtcggctcatgccagtggttcactgcctgtaccagtaaactccagttggtttcaccgagatgatcgtagctttcgaacgggccgtggctgacctgccatttgccatcctggtgactgaccagtcgactgtcaacttcgctttccatcgccagacccgccaactcgtctggagagatcgggtcaataaaattattaaagccgcgttttaacaccaccgggcgtttctgccagtgacgttcaagaaaatcgggccagttaagagtgagttggtattccatgttaagcatccacaggctggtatctgcaaccgattataacggatgcttaacgtaatgcgtgaagtatgggcatatttattcatctttcggcgcagaatgctggcgaccaaaaatcacctccatccgcgcaccgcccagcatgctctctccggcgacgattttaccctcatattgctcggtgatttcgcgggctaccgccagccctacaccttgcccagggcgtaaagtatcaacccgttgaccacggtcgaaaatgacctctcgcttgcttaatggaataccggggccatcatcctcgaccacaatatagagatgctcgtcggtttgccttgcagaaatttcgacaaactcgaggcaatatttacaggcattatccagcacgttgcccatcacctcgacaaaatcgttctgctcaccgacaaagctgatctctgggctaatatcgagagagatattgacccctttgcgttgatacactttgttcagcgcactggtgagattgtccagcagtggggcgaccggatgcagctcgcggctgagcaatgtcccgccgcgcatactggcacgatgcaggtagtagccaatttgctgactaatgcggctgatttgctccagcattaccggctcagcatcactgacgctcatcttttcactacgcagagaacgcagcgtactttgcagcaccgccagtggcgttttcagactatgggtcaggtcggtgagcgtcgtacggtatttgtcgtaacgttcgcgttcactttttaacaatcggttcaggtttcgtaccagactggtcagttctcgcgttgtggctggattgagcaattcgcggttatgttcttccagttcgcggacttcttttgccagggcttcgatggggcgtaaactccaccaggcggcgacccacagcagcgggatcactaacagcagattggcactgagcacatagataaaccagctccagaccatataggaactttttagctccaccggaatggtatccaccaccacaatggttaattttggcatccggcttgttgccgggtagacgtttactgccacgctgtgggtcatctccgcgtcgtcatcatcttcccgcacttcctgcaactgttgctgtatgctatgatctccactcagcaagaggctggtatcgttaacatccgcttcaatttcatgaaaaccattgcttttcagccagtcaggctggatcatcttcatcagccagggcacgtcacgttgcgcccataaaagctgcccgttctcatcataaattagcgtcatggtggggctttgcttgtcgatattttcgggtaactcgacatgcaacttattgttttcccacttcgcaagggtatagaacagattgctctcgccacgtaacagccgaaacgtagttttatcgaaactgacgctataaccgatcagcgcgaccattccgtaggcaaggctaagcaccagtactaccgctgccgttgccaacagaaaacgtacccgcaggctgagcgggaaaaaaagacgcagtaattttttcatcagcgcaattcgaacagatagccctggccgcgaacggtggtaatcacttcttggggatattgtgcctgaatttttttgcgcagacgtcccatcagtacatcaatggtatggctttcccgcagctccgcatccggatagagttggagcattaagctatctttgctgaccactttgccattattgcgtatcaacgtttccataatagtgtattcgaacgcggtcagtttgatcacttcgtcattaatagataattcacggcgagagagatcaacctgaaacggggggaggctaatgacctgactagccagaccgctattacgccgcattaatgcctgcattcgcgccatcacctcttcaatatgaaacggtttagtcacataatcatcagcaccggcacttaatacttcgactttgtcctgccagctttcacgggcggttaataccagaatcggcagactaacatcgttgctacgccagcggcgaatcagactcagaccgtcctcgtctggcaatccgagatcgacaatcgcaatatccggtatatgttcattgagataataatcggcttctttggcatcttctgcgtcatcgacctgatgaccagcatcctgaatctgaactttaaggtggtgacgtaacaacgcattgtcttcaacaaccagtacgcgcatttttatttctccctgtcttaattattaaaatagtgtaacgcgattatgtggttatgggggtaaacattaaataaaccagcggggaggggaggtaaagtgaaaaaataaaaagcggataatcttaataagcaggccggacagcatcgccatccggcactgatacgaggtttatttcagctcatcaaccatcgtgatagctcgaccaatatagttagccggcgtcatcgctttcaggcgggctttctcttcttctggcaacgccagaccatcgataaactgcttcatgccttcggcgtcaacgcgcttaccgcgagtcagctctttcagcttctcgtacggtttttcgatgccatagcgacgcataactgtctggattggttcagccagcacttcccagttgtgatccagttcatccagcagatggtcacggttcacttccagtttgctcacgcctttcagggtggattgatatgcaatcaaggcataaccgatacccacgccgaggttacgcagcacggtagagtcggtcaggtcacgctgccagcgggaaaccggcagtttgcttgccagatgctgcaataccgcgttggaaaggcccagattcccttcggagttttcgaagtcgatcgggttaactttatgcggcatggtggaagaaccaatctcaccagcaatggttttctgtttgaagtggttaagggcgatataaccccagacgtcacggtcaaagtcgatcagaatagtgttgaagcgcgcaacgcaatcaaacagttcggcaatgtagtcgtgcggttcgatctgggtggtgtacgggttccactgaatacccaggctggtgacgaactcttcgctgaactgatgccagtcaacttccgggtaagcggcgatgtgggcgttatagttaccgaccgcgccgttgattttgccgaggatctccacctggttaagctggcggtactggcgctccatacggtaggcgacgtttgccatctctttaccgatggtactcggcgtggctggctgaccgtgggtacgagacagcagcgggatatcgcgatactgaacggcgagatctttaatgccatcaatcagttgacgccagtatggcaggatcacttcatcacgcgcggttttcagcattaatgcgtgggagaggttattgatatcttcgctagtacaggcaaagtggatgaattcagaaaccgcgtgcagttccgggatctccgccactttttctttcaggaaatactcaaccgctttaacgtcgtggttagtggtacgctcgatagttttgatgcgcgccgcatcttcttcgctgaaactggcgacgattgcatcaaggtaaccgattgcgtcggcagcaaaagcaggaacttccttgatcgctgcgtgcgcggccagtttttgcagccaacgtacttcaacttgtacacggaatttcagcaaaccatattcgctgaaaatcccgcgcagcgcgctgactttatcgccgtagcgtccatcgacaggggaaacggcggtcagactggataattccatagatcacaactccggggttaaatgagcaagaatttgttttgcctgagtggtcaggcgattacgagaaaacatcagttgcagacgtccgccgccgacctggtgccagagcacggcggcgcgaatgcctgccagcagggttgcgcgaactttcgcctgcacttgtgggctttgcagtacagcaggggaaccggtgacctgaatgcgcgggccaagcgggctaatcacatcaacatagatagcagccatcgcgctcatcagcgtttcggactgtaaatcgaagtgttcgagctggcgttgcaggccgttgatccggttgcccagagtgtcgagcgcgcctttcgcactggagagtttgcgctcaagcaccatcaagctgagtgtgtagcgggttaattcggcgtttaagccctggcgactgctggcattgagcacgccgagcagggtttccagcccgacgcgcaggttggcttcgctaccgccaaaaaccgccagcgtgctgctggggttcatatcaataatactgttgagactgacgtgtagcgcatcggcatcacaatgcccctggtgagcgagttgttgcaccaggcgtgcgctctgacaaataccggccagggcgagggtgatgtcatagtaattctttgccacgttcactgcttccttgttttaagtaaagataataatcagaccggcagcggcagacgctgctcaataataccgccaccgaggcacacttcaccgttatagaagacggcagactggcccggcgtcacggcggcaaccggttcatcgaaaatcacttcaatgcgatcatcgtccagcgccttgacggtgcaagggatatcggtctggcgatagcgggtttttaccgtgcaacgcatagtgccggtgaatggttcgcgatcgacccagtgcaactgctgggcaatcaacccgacagacatcagccgcgggtgttcatggccctgagcgacaaccagaatgttgttttcgacgtctttgtccaccacataccacggttcttcggtaccttctttggtgccaccgatacccagacctttacgctgaccgagagtgtgatacatcagcccctggtgctcaccaatttcatcgccatcgacggtaatgattttgcccggttgcgccgggagataacggcccaggaactcgcggaatttacgttcgccaatgaagcaaatgccggtagagtcttttttcttcgcggtgaccagaccaagatcttcagcaatcttacgcacctgcggtttttccagttcgccgaccgggaacaggctttgcgcaatctgctcatggctgagcgtataaaggaagtagctctggtctttattgctgtccagaccacgcagcaggcggctcttgccatcgacatcggcccgacgtacgtaatgaccggtagcgatataatcggcacctaaatcttcggcggcaaattcgaggaaggctttaaatttgatctctttgttgcacagaatatccggattcggcgtgcgaccggctttatattcggcaaggaacagttcgaagacgttgtcccagtactcggcagcaaagttaacggtgtgcagttcaatgccgagcttgtcgcagacagcctgggcatcagccagatccgctgccgctgtgcaatattcctcaccgtcgtcttcttcccagttcttcataaacaggccttcgacctgatatccctgttgttgcaacagccaggcagaaacggaggaatcgacaccgccggacatgccgacgattactttttttgcggtttcagacattggatcactcacgacattgaacttcaaggcggcgtattctatcacgcagccttttagatgacaccctttgtaaaaggccagttaaaatcgccaatcatctccagcggataacgttgcccgctttgataacaacgaatactttccgccaccagcgggctacgaagattactcgcctgtaaaatttcttcggcgctgacccaacggcagcagtcgatatcgctgtcatgaggctgggtcgggcatatttgctcaagctcaatggcaaagaggaaacgcaaaaacggcgttttatctggcgcaatccactgatgcatacgaataaagtgttgcggctgcgcgctgatgccggtttcttcccacagttcacgggcggcggcttccactaaggtttcatcggcttccagatgcccggcaggttggttccataacgctttaccattaatcgtctcttcaacgactaaaaatttgccttctgcgtgcaccacgcaagcaacggtaacgtgcggtttaaacattttgcatccttaatctgtcacttctcgccattcaccattggcaagattatccaaagagtaatcacccatcgcatagcgaatcagtcgcagcgtggggaagccaacatgggcggtcatgcggcgcacctggcgattacgtccttcatataaggtgatcttcagccagctggtgggaatacttttgcgttcacgaattggtggattccgcggccataaccacgcgggttcgtcaaccagctccgcgccggcgggcagggtagggccatcatttaaggttacgccattgcgcaaggcttcaagtgcgtcttgtgtgggaataccttccacctgcacataatagatttttccggtgcgtttacccggctgggttaaacgcgcctgcaacgcgccgttattggtcagcaccagcaacccttcgctatcgcggtcaaggcgacctgctgcataaacaccctgaaccgggatgaattcttttaatgttttgcgtccggcttcatcggtgaactgcggaagaacatcgtagggtttattgaacaggatcacacgcgtgggctggttttcaggtttacgcctggtagaacgttggctgctgaatcgcttaacctggtgatttctaaaagaagttttttgcatggtattttcagagattatgaattgccgcattatagcctaataacgcgcatctttcatgacggcaaacaatagggtagtattgacaagccaattacaaatcattaacaaaaaattgctctaaagcatccgtatcgcaggacgcaaacgcatatgcaacgtggtggcagacgagcaaaccagtagcgctcgaaggagaggtgaatggaaagtaaagtagttgttccggcacaaggcaagaagatcaccctgcaaaacggcaaactcaacgttcctgaaaatccgattatcccttacattgaaggtgatggaatcggtgtagatgtaaccccagccatgctgaaagtggtcgacgctgcagtcgagaaagcctataaaggcgagcgtaaaatctcctggatggaaatttacaccggtgaaaaatccacacaggtttatggtcaggacgtctggctgcctgctgaaactcttgatctgattcgtgaatatcgcgttgccattaaaggtccgctgaccactccggttggtggcggtattcgctctctgaacgttgccctgcgccaggaactggatctctacatctgcctgcgtccggtacgttactatcagggcactccaagcccggttaaacaccctgaactgaccgatatggttatcttccgtgaaaacagcgaagacatttatgcgggtatcgaatggaaagcagactctgccgacgccgagaaagtgattaaattcctgcgtgaagagatgggggtgaagaaaattcgcttcccggaacattgtggtatcggtattaagccgtgtagcgaagaaggcaccaaacgtctggttcgtgcagcgatcgaatacgcaattgctaacgatcgtgactctgtgactctggtgcacaaaggcaacatcatgaagttcaccgaaggagcgtttaaagactggggctaccagctggcgcgtgaagagtttggcggtgaactgatcgacggtggcccgtggctgaaagttaaaaacccgaacactggcaaagagatcgtcattaaagacgtgattgctgatgcattcctgcaacagatcctgctgcgtccggctgaatatgatgttatcgcctgtatgaacctgaacggtgactacatttctgacgccctggcagcgcaggttggcggtatcggtatcgcccctggtgcaaacatcggtgacgaatgcgccctgtttgaagccacccacggtactgcgccgaaatatgccggtcaggacaaagtaaatcctggctctattattctctccgctgagatgatgctgcgccacatgggttggaccgaagcggctgacttaattgttaaaggtatggaaggcgcaatcaacgcgaaaaccgtaacctatgacttcgagcgtctgatggatggcgctaaactgctgaaatgtagtgagtttggtgacgcgatcatcgaaaacatgtaatgccgtagtttgttaaatttattaacgggagcgtaacgctcccgttgttttttgttaggctgctaacggttatcaaaattttatcaaaaaaagttatcaaaacccctcggtagttttggggtaggctggccggtcaggtggtagttctactactagtctcccacatagatattccttagctttttattattgctggcggacgctcgttaatatttaaggtcttcattgattaagacatccccaaagttagttatgtattcactgttattaggacaattatgaattaccactccttacacccgctcaaatattgttaaattgccggttttgtatcaactactcacccgggactcgccaggggacagccaacaggcattgggtgcaatcaccttagcgttcaggtacatgcggaatgtaaaaaaggccgcgagcgcggccccttcacatacatctttagtactgagactgtttaacctagggaattattatcgtattatattgcattacaactcccaacagtgacatatgaacttcctgctttactccacgactttaatatttcaaggccatgtgaagaacatatttcttgcactgcgagttcatcgagtaatccatagtaagaaacactttttgaatttttgtaaatgtatccgtaaagatgttttcttcctgtttcgtattttttgaagtatgagcttttatattgatttacaataagagtctcacctcctgattttagtaatctcttgatgctaagaactatcagataattcaaagcgtggctgtgatgataggaattatgttttttacgtgaatgagaataatcttaaatgaggaataactcattgattgacaatatttttattcaagaagtgtcattgactgttaacgcaatgttgtaaaggtaagataatctgatttatcaatattattgtgtgatttttatgtgagcagaagatattcatcagcaacgattacattagtcattttattttgccgacggcctcattgtcgaaagataagcgtacgacagtattatcagaaaagagtgattttttatccaactacacttcagcgcactgcgtgtaaaaaatgcctctttcttatgcgggatatcatcatttcatcatgatgtctttggtgagcggtgaacacaatgcacctgcgctgtctcttcaggatgaatcccctggtctggtgcctgcgggctgatgttgcagcagagcttaggagtcttagacgctactatcatttatccaatggcatggaaagcaaaagtgtcgatacccgcagtatatatcgtgaactgggtgcaacgctgagttacaacatgcgcctggggaacggtatggaaatgaaccctggctgaaggcggctgtgcgcaaagaatttgtcgatgataaccgggtgaaggtgaataatgacggtaatttcgtcaatgatttgagcggcagacgtggaatataccaggcagctattaaagccagtttcagcagtacgtttagcggacatctcggggtggggtatagccatggtgccggtgtggaatccccgtggaacgcggtggctggtgtgaactggagcttctgaccatcaacgattaaactgcgcttcggcgcagttttcgtttacaggatgttgaaagggaaaattctggggcaaaaaaagcccgccagttacggcgggaaacctcatcctatgggagaacaatgaataatgaaattgcggggttatcatctcccagtatatccatactaacaataaggttatttactcaaccaggcataaacattttgttttgtgcgtgggaacagccttaaggtgtaaagggggaggtggaaatagcaatgaggagtatcagcaagaatactcgccgctttaccacaacgtggatgagagggatgaaaaactcaaggcagagataactctgccttgaagataaatgcgcttttacagcgggcttatttcagctcttctgcttccggtaaggtcacgttcagctcaagaatagaaatatcgccatctttttgctcaagctgtacggttaccatctcaggatcaatttgtacgtatttacaaatgacctcaagaatatctttacgcaactgcggcagataatgcggttctgcatcgctgcgacggcgttcagcaacaataatctgcagccgttcttttgcaatgttggctgtgtttttcttccggctgagaaagaaatcgagtaatgccataacttatcctccgaacaagcgtttgaggaagcctttcttctcttcttcaatgaagcggaaaggacgttcttctcccaacagacgttctacggtatctgcgtaggctttacccgcatcggcgttaatgtcgagaatgaccggttcaccctggttagaggcgcgcaatacactttgatcctctgggatcacgccgacgagtttgatgcgcaggatctccagcacatcttccatgctcagcatgtcacctctgcttacgcggcctgggttatagcgcgttaacagcaggtgctctttaataggctcttcgccattttctgcgcggcgacttttgctcgccagaatgcctaaaatacggtcagagtcgcgtacactggagacttccgggttggtggtaataatggcttcgtctgcaaaatagagtgccattaacgcaccggtttcaatccctgccggggagtcacaaacgataaattcaaaatccatcgctttcagatcatcaagaactttggcgaccccttcacgggtgagggcatctttatcgcgtgtttggcttgccggcagaatatagagattttcagtacgcttatctttaattaacgcctgatttagcgttgcatcgccctgaatgacgttgacgaaatcgtaaacgacccggcgttcacaacccataatcaggtcgagattacgcaggccgatatcaaaatctatcacgacagttttctttcccttctgggccaaaccagtggcgatggccgcgctggaggttgtcttaccaacaccccctttgccgctagtaacaacaataatgcgtgccatagaaattccttgttaaaaagggatcaatttaacggttgaacggtcaaagcgttttcgactaactgcagtcgcgccgctttgccataaaattctgctgggatttgatcactcagccagtattcacctgcgatggacaccagttccgccatcaggttcgtacaaaatatttgcgtttcccggtcaccacttgcccctgccagcgcacgaccgcgcatcatgccatagacatgaatgttcccatcggcaatcaattcggccccagcgctaacgtggcttgtaacaatcagatcacattgtggagcataaatacgctgaccggaacgcaccggggtatctattaaacgcgtttttgtgaccggcgttgtattttgcgctggagcctgcggtgtgggagctggacgtggcgctttttcctttccttccgtcaggataggcagccccatcttttcaatttcggctttaagttgcgcatctttgcagccacttacgccaataacccgcaaaccggttgcgctaaccgccttatgcatcgcactccagtttaccgggtcttccagtgcactgacgttgagtacaacgggggcatgttttaaaaatgcgggggcctgagcgattttgtcttccagcgcctgatggataaccttaggttctgcctcatgcagatgaaccacagataaagtgaagctactgcctttaagctcgattggcgtgttactcatcctggccttactcaattagctattaatcatcgccagcgcgcgatgatgttccgaagactataaggcatgttatagtctggattatattgaggcaagtcaccctcccatttattcagagtaaaagtctattctgtgataaatggcgctgattcatagcttaaaaaatacccttgtcaatcaacccattgccgtcgtacttttgattgttcttatttacgcttcctttttccgcaccctaatcgtgacagcatctccagacctgtttaaatatccagtattgaggcaagtgtattttttcaccacgccaggctttcttaactttccattttttgcggcatcattaaagaacagatacccgttatcttaatatccgccacagaattgctctatcatagaaaccgcagaagacgtctgatacttctgtcaggtcatcgtaactcgtccaggtcagcggttttgattacggattgatgatgaaatgagcataagtgttgtacggttggattatcaggatgtgctatgaatatgatgcgtattttttatatcggattgagtggtgtggggatgatgttcagtagtatggcgtctggaaatgacgctggcggacttcaatctccggcgtgcggcgttgtttgcgacccgtatatttgtgtgaacagtgatggcatttccccagagttaacaaggaaatatctcggcgaaaaagccgctgaaaacttacaaagtttacaaggctacgatcccagcgaatttacattcgctaacggtgtattttgcgatgttaaagaaaaattatgtcgtgatgatcgttattttggtgtggatggtaagcggagtggaaaaatcaatcaaaccaccacaaagatgttatttatgtgtcgtgagtgatgtcttgtttacattatgttctattcgtcattaacctcttgagcgacagagaggagtggggcattaacgtttatgacggggagagtccccgtcggttgacatttacttaatttgaatatcgacgttatattttttagttttgtttttacgggcgtcgtttcgggtttgcaacactcgcagctcatatttgccagaagcagggagactgtattgtccgtgactatcgagttctggggaatatctggataaatcaacactatcatcgattcctggcccgaagaggtaagtatcagcgccttcattagagatactcacatgcactttctgaccttttttggcatagaaggtatatgtatcgtaatcgtatccctttatttcgccggagtactgagcgctgctatggccttttctgaactcaacattgacattcttacccgcagcaaagctcgtggaggttagcagtgcaagcagcaatacagccttcctgatgctcttgattttcattggtagtctcctgttcagaatgagtacgatgaactgttataatataacaatccctaacgggagaattccagtggctttcctgcgttcggtaaaatcacgttgcggcatttttgccggggggattacttataaagggggcatggactcaacaaaccgtagaaatctacagctggctggcttgtggcgcgggtttcattgatgttagcttatgccaaaacctggcatcttaaagagtaaaagtatgttttgtgtgatttatcgaagcagcaagcgtgaccagacctatttatatgtcgaaaaaaaagacgattttagccgtgttcctgaggaactgatgaaaggttttggtcagcctcagttagcgatgattctgccgctggatgggcggaagaaactggtcaatgccgatattgaaaaggttaaacaggcattaaccgagcaaggttactatttgcagttaccgccaccacccgaagatttgctgaagcaacatctttccgtcatggggcagaaaacagacgacactaacaaataaccgatatccggcggtggcattatctttgtcggcgcgggttttcatatccacgataaggtgaggggaacgttatgtatcaacatcacaactggcaaggtgcgctgctggattatccggtgagtaaagtagtctgtgttggcagtaactatgccaaacatattaaagagatgggcagcgcagtgcccgaagagccagtgctgtttattaaaccagaaacggcactgtgcgatctgcggcagccattggcgatcccatccgatttcggtagtgttcatcatgaagtcgaactggcggtgttgattggcgcgacactgcgtcaggctacggaagagcatgtccgcaaagccattgccggttatggcgtggcgctcgatctgacattgcgtgatgttcagggaaaaatgaagaaagccgggcagccgtgggaaaaggctaaagcgtttgataactcttgtccgctttccgggtttattcccgcggcggaatttaccggcgacccgcaaaatacaacgctgagcctgagcgtaaacggcgaacaacgccagcaaggtacgactgcggacatgatccataaaatcgttccgctgatcgcttatatgagcaagttttttaccctcaaggccggtgacgttgtgttgacaggcacgcctgatggcgtcggcccgttgcaaagcggtgatgagctgacagtcactttcgatgggcattctttgacaactcgcgttttgtaatactttttgccgcctgaaagcggcggcaaaacttgcatcgctgtgccagactggttataaggtgcgttttaacgtaatggcggaacacctgatgagcgatgtacctttctggcaaagtaaaaccctggacgaaatgagcgatgcggaatgggagagcttgtgtgatggttgcggtcagtgttgcctgcataaactgatggatgaagacaccgacgaaatctacttcactaacgtcgcctgtcgccagctcaatattaaaacctgtcaatgtcggaactacgaacgtcgtttcgagtttgaacccgactgcattaaattaacccgtgaaaatctgccaacattcgaatggctgccaatgacctgcgcttatcgtttgctggcggaaggtaaagatttacctgcgtggcatccgctacttactggtagcaaagcggcaatgcatggtgaacgtatctctgtgcgtcatatcgcagtgaaagaaagtgaagtgattgactggcaggatcatatcttaaataaacctgactgggcgcagtgataaatttaatagatgctgatgggggctttcttaatatacgtctggatgctcgccatttcgtagccctgtttttgaaagcgctctgtcataatgagagttacccgataccttattatcaacaggtaactctcaatctttaaaaaacgtctgtgtttttaaatgtgataaaccttataccttgagtacatggagagaataatcgcttatcagacttcaggtacctcaaagagtgtctttttaccgtgtcttttctgatactcattacaggtgttaatcatttttttggccgcttcttttagcaaagaaagcattaaatcatcataatcaacgtagaatctggttgtttcagtttccgtttttatctcaccgatggcggctatttcggtggttaatttcaatttggcggcatcgatatctttattcgcttgtttaaccgtgttagacagggtggtaaagaaattctgcacagattttaacttgttcttcaattctggaatcagttttccttcaactacgcccgcagcaatagaataggaaatgattaatccaaatggaccggcgacgacaccggctgcggcaccggcatatgcttccttcctgattttatctacctgactctggaaatagctgcttttttcactaaaatcattggttaactggctatctaacgccagcagtttcccggaagcgttgttgaaactttgactgcttaccagcagggatttttgcgcttcattcagcttcgtgatgccgtcatccagtaccttaatgagaatgtctttctgggcggatgctttcttctcattgtactcatcaaatagcaaaatatacgctgcgagcaattgcgtcgcaacaccacaccattcatacactgtttgggttgcttcaaaatacttatcctggctatccataagtaaggttttaatatcgccgactaaaacggaggctgcctgactatactcctgtttaaagcgacttaactcttttatggtttcatcaaaggtctgccaggggatgacctgatcgagatatttattataaagatctaatgctccatctgcggtttcgattgcgtttttaactacttctaccgttttatctgcaacgatttcagtcataatcattcgcctctttaaatatataaattgtaatgaaactcctgttttacaactattaataaattttacttcatctaattcatagttagccgggcgggatgcgtcaatgtctttatttctattaatatgataaatatcaaacaatgtttaatgtcattatggcgaatgcttctattctattttttagccgggtgatatttttcatttctgctggatgagcgtcgtcgccagaaggccacgtgagcacaagataagagaacgaaaaatcagcagcctatgcagcgacaaatattgatagcctgaatcagtattgatctgctggcaagaacagactactgtatataaaaacagtataacttcaggcagattattatgttgtttatcaagcctgcggatctccgcgaaattgtgacttttccgctatttagcgatcttgttcagtgtggctttcctagtccggcagcagattacgttgaacagcgcatcgatctgaatcaactgttgatccagcatcccagcgcgacttacttcgtcaaagcaagtggtgattctatgattgatggtggaattagtgacggtgatttactgattgtcgatagcgctattaccgccagccatggtgatattgtcatcgctgctgttgacggcgagtttacggtgaaaaaattgcaactacgcccgacggtacagcttattcccatgaacagcgcgtacagccccattaccatcagtagtgaagatacgctggatgtctttggtgtggtgatccacgtcgttaaggcgatgcgctgatgtttgccctctgtgatgtaaacgcgttttatgccagctgtgagacggtgtttcgccctgatttatggggtaaaccggtggttgtgctaagcaataatgacggttgcgttatcgcccgaaacgctgaggcaaaggcgcttggcgttaaaatgggcgatccctggttcaaacaaaaagatctgtttcgtcgctgtggcgtggtttgctttagcagcaattatgagctttacgcagacatgagcaatcgggtgatgagcacgctggaagagctaagcccccgcgtcgagatttacagtattgatgaggcattctgcgatctgacaggtgtgcgtaattgtcgcgatctgactgattttggcagagaaattcgcgcaacggtgctacaacgtacccatcttactgttggtgtggggatcgcccagaccaaaacgctggctaagcttgccaatcatgcggcaaaaaaatggcagcggcagacgggtggggtggtggatttaagtaatctggaacgccagcgtaaattaatgtctgctctccccgtggatgacgtctgggggattggacggcggatcagcaaaaaactggacgcgatggggatcaaaaccgttctcgatttggcggatacagatatccggtttatccgtaaacattttaatgtcgtgctcgaaagaacggtgcgtgaactgcgcggcgaaccctgtttgcaactggaagagtttgcaccgacgaagcaggaaattatctgttcccgcagctttggtgaacgcatcacggattatccgagcatgcggcaggccatttgtagttacgctgcccgggcggcggaaaaacttcgcagcgagcatcaatattgtcggtttatctccacgtttattaagacgagtccatttgcgctcaatgaaccttattacggcaatagcgcgagcgtaaaactgctgacgcccactcaggacagcagggatatcattaacgctgctacgcgatctctggatgccatctggcaagcgggccatcgttaccaaaaagcgggcgtgatgctgggggatttcttcagtcagggagtcgcgcagctcaatttattcgatgacaacgcaccgcgccccgggagtgagcaattgatgacggtaatggatacactgaatgctaaagagggcagaggaacactctattttgccgggcaggggatccagcaacaatggcagatgaagcgagccatgcttagtccacgttatacaacgcgaagttctgatttactgagggtcaaataaatatagcggcaggaaaaaagcgctcccgcaggagcgccgaatggattagcgaccgaacagatcacgttttttcgctttaaacggctgggaaatcaccaccagcactgcgacaatcaggtaagcgataaaaataccgagcagccactgcggcatttccagacctaaaaaatcccactgacgctcggcgcaatcgccagaggcgacaaacacttgcggcacccacttatccagcggcagccattccgggaaacgaaccataaaatcacaggtggcaaacgggctaggatagagctgaagcatggtgtgctcgtaagttaactgcacaccgcggaacgcactatacaaccagataaccatcgctacataacgcagcggagttttcggggcgatcgcgccaatcagcgcagcacccagaacgccgaataacgcgcagcgttcataaatacagagcacgcaaggtttcagtaacatcacatgctggaaccacagcgccgtcagttccagtgccagagcagtaaacgccatcaacagccacgcgccccggccttgactacattggttcaaaaatcgcaacataatcatttccctgcaatatgcatagagtgcgcagtttaaaccaattcattcgctgcgccaccaggaggcagcaaaaataggacgcaattggacaattatcgggcgaaaaggcaaaccgggcatttgtatgcccggtaagttgttatcaaagcgttgctatccagcccatttgcataaaccattcggttacaggggcaagcgtaaactcgacgcagagcaagccgacgagtgtcaggacgagggtgtaaggcagggccatccacaccatgcggccataagagaggcgaatcaatggcgcgagtgcagaggtcagcaggaacaggaacgcagcctgaccgttcggcgtagcgacggagggcagattggtaccggtattaatggcgaccgccagcagctcgtattgcttcaacgtgatagcgccactttccattgccgctttcgcttcgttgatataaatcgtccccacgaagacgttatcgctaatggaactcagcagaccgttgaaaatatagaacaggctcagctgagcatgttcgcttgcctgcaacacaaactgaataattgggctaaacagttgttggtcgataatcaccgcgactacgctgaaaaacaccgtcaacagtgcggtgaatggcagagattcggtgaaggctttaccgatagcatgctcatcggtgacaccggtcaaacttgttgccagaataatgacactcaaaccaatcaagccaacttccgccagatgcaacgccagcgcagtcaccagccagacgccaataatcgcctggacaatcagacggattttatcctgacgggtacgctggtggcggctttgatcgtcaaactgttgcaacacttcgcggactttctccggcagcgtttcaccgtagccaaaccaacgcagcttctctaccagcaggcaggttaacaggccacaaatcagaaccggaacggtcaccgggctcatgcgcaggaagaaatcgccaaaatgccagccagccgctttagcgatgatcaggttctgtggttcgcccaccatggtcattacgccgcctaatgcggtgccgacaccggcatgcatcatcaggctacgcagaaagccacggaactgttccagaaccactttgtaatgcttgtcgatatgactatcgtcttgcaggtcggtgtcttcggtacgggaagaggctacgcggtgataaataccataaaaaccgactgcaacgctgatcaccaccgccacgacggttaaggcatcgaggaacgcggagaggaacgcagccgccacgcaaaaagagaggctcagcagcattttggagcgaatgcttaacagcaaacgggtaaatatgaacagcaacagctgtttcataaaatagatacccgccaccataaacatcagtaacagcaagacttcaagatttgccgccacctcttcacggacgtgttccgcgctggtcatgccgatgaataccgcttcgatagccaacagaccaccggggagcagcgggtagcatttcagggccatcgccagagtgaaaataaattccgctaccagcaaccagcccgcgacgaaagggctgatgaggaaaattaacgggtttacgattaagaaaatgatgagggcgagtttgtaccagtcgggggactggcccaaaaaattgcgccatagcgcgcggccccaggagatctccatgatggtttcccttaccttacaaataatcaatgatgtttttatgtttaaacgcaaagcttaacggtcaggcaggagtgaggcaagtcttgatagtcaaggggaaagagatgcggaaaatgaagccttgatccctttttcttctttttgtctgctatcagcgtagttagccctctggtatgatgagtccaactttgttttgctgtgttatggaaatctcactatggtcattaaggcgcaaagcccggcgggtttcgcggaagagtacattattgaaagtatctggaataaccgcttccctcccgggactattttgcccgcagaacgtgaacttagtgaattaattggcgtaacgcgtactacgttacgtgaagtgttacagcgtctggcacgagatggctggttgaccattcaacatggcaagccgacgaaggtgaataatttctgggaaacttccggtttaaatatccttgaaacactggcgcgactggatcacgaaagtgtgccgcagcttattgataatttgctgagcgtgcgtaccaatatttccactatttttattcgcaccgcgtttcgtcagcatcccgataaagcgcaggaagtgctggctaccgctaatgaagtggccgatcacgccgatgcctttgccgagctggattacaacatattccgcggcctggcgtttgcttccggcaacccgatttacggtctgattcttaacgggatgaaagggctgtatacgcgtattggtcgtcactatttcgccaatccggaagcgcgcagtctggcgctgggcttctaccacaaactgagcgcgttgtgcagtgaaggcgcgcacgatcaggtgtacgaaacagtgcgtcgctatgggcatgagagtggcgagatttggcaccggatgcagaaaaatctgccgggtgatttagccattcaggggcgataatcccttccgtttaaagagcaaacccctcaaacgaggggttttttgttgtttttacagatttcccattcttggcgggcaacgttccagcaactcgatgctgccgtcttcgttttgctgttcgagcatcacatcaaatccccacaggcgatgcacatgcttcaggacttctttgcgcccccgatccagcggtgcgcgattatgtggaatataacgcagcgtcaggctacggtcgccgcgcaaatccacgttccagatctgaatattcggctccagattacttaagttatattggctgcttaaccggttacggatctcccgataaccttcttcattatgaatagcggaaatctccagataattatgccgatcgtcatccagcacggtgaagaagcggaaatcacgcatcactttcggactcaggaactggctgataaaactctcatctttgaaatcacgcatcgcgaaatgcagcgtttccagccagtcggaaccggcgatatccgggaaccagtatttgtcttcttccgttgggctctgacaaatccgtttaatatcctggaacatggcgaacccgagggcatacgggttgatgccgctgtaccacgggctgttataggggggctggaagaccacattggtgtggctgtgcaaaaactccagcataaaacgttccgttactttcccttcatcatacagatggttaaggatggtgtagtgccagaaggtcgcccagccttcgttcatcacctgagtctgtttttgcggataaaaatactggctcaccttacgcacaatacgcaggatttcacgctgccaactttccagcagtggcgcatttttctccataaaatagagcaggttttcttgtggttcggacggatagcggcgcgcttcagcaaccgttttctcttcctcgcgcttcggcagggtacgccagagcatattgacctgactttgcagatactcttcgcgacttttctgccgggctttctcttcttgcaggctgattttttgcgggcgtttgtaccggtccacgccgtagttcatcagcgcgtggcagctgtccagaagccgttctacttcatcaacgccataacgctcttcgcactcggtaatatatttacgggcaaaaatcagataatcgacaatgctactggcgtcggtccagctacggaataagtaattgtttttgaagaaagagttatgcccatagcaggcatgagccatcaccagcgcttgcatggtaatggtgttctcttccatcaggtaagcgatacacgggttagagttaatgacgatttcataggccagtccttgctgaccgtgcttatacagccgttcagtctcgataaactttttaccgaaactccagtgcggatagttaattggcatgccgacgctggagtaggcatccatcatctgttcactggttatcacttcaatctggtgcgggtaggtatccagccggtagagtttcgccacccggtctatctctgccagataaacatccagcaggtcgaacgtccagtcgggtccatcgctcaaacgtgtggtgtccttattcatagaatcgatcgtcgccatacgcgcacctcattgttgtcggcgctctctgtgtggagcacctcatttcaagcatagaacacctgttaaaaaccgcgtcgccggagaatttttttctttgcgatttcttattatcagagtgccactaatccgcttctgaacggaattttatgctggataaaaagggcgttcagcaggagatactaaagacgccatattgccgcagagtcagggagatgtgagccagctcaccataaaaaagccgcatgttgaataatattttcaactgagttatcaagatgtgattagattattattcttttactgtatctaccgttatcggagtggctatgcgagttgtcatactgggaagtggtgtggtaggcgttgccagcgcctggtacttaaatcaggcaggacatgaggtcaccgtcattgatcgggagccgggggccgccctggaaaccagtgccgcgaatgccgggcaaatctcccccggatatgctgcaccgtgggcggcaccaggtgtgcctttaaaagcgattaaatggatgttccagcgccatgcgccgctggcggttcgtctcgacggtacgcagttccagttgaaatggatgtggcaaatgttacgtaactgcgacaccagccactacatggaaaacaaagggcggatggtgcgtctggcggaatacagccgtgattgcctgaaagcattgcgcgccgaaaccaatattcagtatgaagggcgtcagggtgggacgctgcaactgttccgtaccgaacaacagtatgaaaatgcgacccgcgatatcgccgtgctggaagatgccggcgtaccgtatcagctgctggaatccagccgcctggcggaagtggagcccgcgctggcagaagtggcgcacaaactgacgggcggcctgcagttacccaatgatgaaaccggagactgtcagctatttacccagaatctggcgcggatggcggagcaggcgggggttaaattccgctttaatacgcccgttgaccaactgctttgcgacggcgagcaaatctacggcgtgaagtgtggcgatgaagtgattaaggccgatgcgtatgtgatggcgtttggttcttacagcacggcgatgctcaaaggcattgttgatattccggtgtatccgctgaaaggctacagcctgaccattccaattgcgcaggaagatggtgcgccggtatccaccattcttgatgaaacctacaaaatcgccattacccgtttcgataaccgcattcgtgttggcggaatggcggagattgttggttttaataccgagctgttgcaaccgcgtcgtgaaacgctggagatggtggttcgcgatctctatccacgcggcggtcatgtcgagcaggcgactttctggactggtctgcgcccgatgacgccagacggcacgccggttgtcgggcgtacacgctttaaaaatctgtggctgaataccggtcacggcacgctcggctggacgatggcttgcggttccggtcagttgttaagcgatctgctctctggtcgcacgccagcgatcccatatgaggatctaagcgtagcgcgctacagccgtggatttacgccaagtcgtccgggccatttacatggcgcacacagctaaggaaacgagatgacccgtccgatacaggccagcctcgatctgcaggcattaaaacagaatctgtccattgtccgccaggccgcgacgcacgcgcgcgtctggagcgtggtaaaagcgaacgcttacgggcatggtattgagcgtatctggagcgcgatcggggccaccgatggctttgcattgcttaacctggaagaggcaataacgttacgtgagcgcggctggaaaggaccgatcctgatgctggaaggatttttccatgctcaggatctggagatttatgaccagcaccgcctgaccacctgcgtacacagcaactggcagctcaaagcactgcaaaatgcgcggctaaaagcaccgttggatatttatcttaaagtgaacagtgggatgaatcggttgggcttccagcccgatcgcgtgcttaccgtctggcagcagttgcgggcaatggcgaatgttggcgaaatgaccctgatgagccattttgccgaagcggaacatcctgatggaatttccggcgcgatggcgcgtattgagcaggcggcggaggggctggagtgtcggcgtagcttgtccaatagcgcggcgactctgtggcacccggaagcgcattttgactgggttcggcctggcattattttgtatggcgctagcccgtccggtcagtggcgtgatatcgccaataccggattacgtccggtgatgacgctaagcagtgagattattggtgtccagacgctaaaagcgggcgagcgtgtgggctacggcggtcgctatactgcgcgcgatgaacagcgaatcggcattgtcgccgcagggtacgccgacggttatccgcgccacgcgcctaccggtacccctgttttagtggacggcgtgcgcaccatgacggtggggaccgtcagcatggatatgctagcggtcgatttaacgccttgcccgcaggcgggtattggtacgccggttgagctgtggggcaaggagatcaaaattgatgatgtcgccgccgctgccggaacggtgggctatgagttgatgtgcgcgctggcgctacgcgtcccggttgtgacggtgtaacttgttgtaagccggatcggaggcaacgtcttctgggtgcaaaaaaatcatccatccggctggtcagcaactgtagttgttaatgtgacagagccattgcccatgatagtgtccattaaaaggatggacactatttccccggaacctgaactcaccgcacaggcgttctacataaaacgcttacgcttcattgttgactcgaactcgacttcagataaatcacgctttacccttgatggagcctgtacatagatttgtgtaattgcctgattttgatatgttcaattcaacatcaaatgaaggttaaattatggacgacaaacaattgcaggctcaggctgcgttcagcaaagcatcgcaaccggcgatagatgcttcattaaatttaagattcagcttcctcttcagccacccgtacgccaatcttcaacacttcattatcttctttctcggccaccgtccagatcatcccggcaaactctacctggtcaccgacaaccggtgccgcgcctaacaactgctggacaatttcacccagcgtttgctgcttatcacgatattctcgcccgtcttccaggccatatatcagcgcaacatcagcatatttggcgctggcttcgagaatgaagtcaccaaagaagcgttgatccagcgcgaccggcgggctctggctgaacagtttaccgagcgccggaagatcgcgttcccgaccaattacacacaacacatcgccttcgcgcagtcgggtgctgccggtaggatgaagcaactggttatcacgaaacagtgccgcaatacgcgtctcttttggcatatgcaaatcgcgcagtgccgcgcccacgcaccatttatcggcactcaattgataaacaaactgctcccacggattttccggatgaatatccaggccaacgcgactcaccggacgtcccactggcggaaccaccactttggcttttttagccgcccagctgagacttgttccctgcaagagcagactaaccagaaccacaaagaaggcgacattaaagaacagacgtgcattctccagccccgccatcatcgggaacacggccaggatgattggcaccgcgccgcgtaatcctacccagctgataaacacgcgctcacgcagattgaaaccgcggaaggggagcaatccagcaaatacgctaaggggacgggcgaagaatatcatccatgcggacaaaatgagcgccggaatggcaataggcagcagatcgcttgggttaaccaacagccccagcaccaggaacatggcgatttgcgccagccaggcgaggccgtcgaaattttgcaggatgccgtagcggttgcgaatagggcgattacccagcagaaaaccgcacagatacaccgccagaataccgctaccttccagcgcagtagttaaactgaaaatcagaataccgccacttaatgccagcaatggatataatccggcgggcagggcgatgcggttgatcatttgcagtagtaaataaccgccgccaagacctattacaatgcccagaccaaattgttgcagaatatcgacaatgaacatccagctaatattgctctcatgatgctggatcatcgcaattagggtaatcgtcagaaagaccgccattggatcattactgccggattcaatttccagcgtgctgccaacacgttcgttaagccccttaccacccagcagagaaaagaccgctgcagcatcggtagagccgacgatagcgccgattaataagccttcaatcaaatcaagattaaacagccacgccgccatcatgccggttaaaccagaggtgataagcacgcccagcgtcgccaggctcagtgccggtcctaacgccacacgaaaggaactggcctgagtgcgcatcccgccgtcgagcaaaataatcgccagtgccaggttacttaccatgtaggcgaaggggtaattatcaaacgggataccgccgacgccatcgactcctgccagcatgccgatcgccagaaaaataaccagaataggaatgccaagacgggaagaaaaactactaagtaatatactgctggtgacaaggatggatcctaagatgaaaaggctaattattgttgtggcatccaacggtcggttactcctgattacgctgtctcttatataaaccctaccatattagcggcagagacagcgttttacttagccctgaagcgtgatttttttacattttaagaacaggatgaccgctaatcgtcaactgagtgccttcccgggtgttattcagaatggcatgtgcgcccaacggcagcgtaaccgtgcgttgttcatgaccaaaatcgaggccggtaatgagtggaatgctcaggcgggaacgcaaaaacgcgtacacactctccaggttgtaacctgcgtcataatcattgggcgtgctgccgctaaagctaccgagaataatcgccttctgacgtggcaaaattcccgcatgatagagctgcaacagcatacgttcgacccggaaagggtgctcgttaatatcttccagcaccagaataccgttctcaatttttggcatccacggtgtaccgatcagactaatcagcatcgcaagattgcctccccacaacgtgccttcggcccgacatgtcgggccttccccttgccattcaatggtgaaggtttcattgcgtaacgccagccagaaatggtgctcggtaaaggcgttcagttcatccgcgccaaagtttgctaccagcatggggccgctaaaggtgatgacattgccatgcgccagaagaccgcactgaatggcggtaaaatcgctatgtccgcaaatgagcaacgggtcatgttgttggcgagccaccagtgcctgccagtcaatatctgccagtaaacgactggcaccgtaaccgccgcgtacagccagcacgatggtgttgggggtagtcagtctggcaagggaattgagatcttccagacgctctgtttccgtacccgcaaaacgctcacaacgacgggcaataacctcgacgttattgacttgatgccccgcgtcggtaaggcgctggataccacgcagcgcggcgtgctgtttaatgcagtaaccgcttggggcaattaagtgaaacagagacatggcaattccttgctgacaacagaaacgaaatgtatatcatgccgcttaggtgtgccgttgtcacctcaacggcgattccaggctataaggatagaagaagtgaaattgagatggtttgcctttttgattgtgttattagcgggttgtagtagtaagcatgactatacgaacccgccgtggaacgcgaaagttccggtgcaacgtgcgatgcagtggatgccaataagccagaaagccggtgcagcctggggcgtcgatccacaattgatcacggcgattatcgctatcgaaagcggtggtaatccgaacgcggtgagtaaaagcaatgccattggtttgatgcagttaaaagctagtacctccggacgtgatgtttatcgccgtatgggctggagtggtgagccgacgaccagcgagctgaaaaatccagagcgtaatattagtatgggggcggcttacctgaatattctggaaaccggcccgctggcaggcattgaagatccgaaggtactgcaatatgcgctggtggtgagttacgctaacggggcaggtgcgctgctacggactttcagcagtgatcggaaaaaggcgatcagcaaaatcaacgatttggatgctgacgagttcctcgaacacgtagcgcgaaatcaccctgcgccgcaggctccgcgctatatctacaaacttgagcaggcactggacgcgatgtaaatcagtcgcgcactttgtccgctttttcccgggcttctcgctcgagagagaaaataatccgctgtaattgccgctccaccgtcgggctgacgttaagaaaacggaagctcagacggggagtggtgatggtttcattcttgccatcaatcactttgcgctcgctgatggagattaactgggcgtcaaagtgaaaaacaccccattgccccatgttgacttcaatctgagcgaagcgcatgccttcttgtaattcggcaggctttgctgtttccagtaatgcgcccatgccgcctaagctcaaatcatacaggcggaaacgtaacgtactgttatccgccagtttggtctggcaaaaataaggcggatggagtggggcggagatgcggaaatatcggcgtcgttgtacaaaccataaggtgggaggcggtacggtaataaatgccggaagctgcaagtattcactctgctgtagttgttcaacagtaaactcgactttcgcaccctgagtttcggcggtaatggtaatgtgctgtgcctttagcacggcgatgttgtcttcggcttgactgccgaaatccagcaccagtttatccggggttattgccagtaatttgctgatcagctgcccgccattccaactgagacgcaaaggaattgcggctttgtgcaaatcgcgtaacacgcccaggacggctaacggattttgtttcaggaactgctcatggtaatgactcacgcggaaaaactcctgactgacaaactgtctttggtttatcggtcacagttaacaaaacttaatacaaatgcgtgaatattttttacatgttgttcttaaatcagccgacatacgcccagcatcgatcccgcccttgcctatacttagagcgttgatgtaagcatttcttgcgtccgattcatcgaaacgagggcctgaacatgggaattattgcctggattatttttgacctgatagccggcattatcgccaagctaatcatgccggggcgtgatggtggtggatttttcctgacctgtattctcgggatagtcggtgcggtggtcggcggctggctggcgaccatgtttggcattggcggctccatcagtggttttaatctgcacagcttcctggtggcggtggtgggagctattctcgttctgggcatattccgcctcctgcgaagagaataagattttcataaggcggatagcgatacagatgccgctatccgctttcacatcagaacgtatactcgacacctgctttacgggtgaaaaaaatcaatatagcacttcgatatccgataaagtcggttcccggtaacaacaacagaatccttttttaattattgtttcgttgtttttggtgtgattcagaaaataaatattttagacagtagccagagtggcgttaaaaatggggcggatagtgaggcggttttggctgcgcttattgaacatttagaattgatcaatccttctggcagattaagccaaaatacccgtagcgcaatgcttcagttacgcgaagaggaatggtctgaattctttttttggttgctaaattctctggagtgtctggattatgtgattattaatttaactccagaaagcaaaaaaacgttgatgagtgaacaccgtaacaatattcaggtagcaattgatgctttatatagccaacgtcggcgtaaaagcccgggtgatgaaagtgaaacacttacccgtagaaatgacgctatcttcggcaaccacgtatggcaaacatttgcgcaatacttcccgccaggacttgaaaaaccgtctgtgtaaaaaaaaccatagctatggtgttatctgccgacaacgccatccggagaagccgaatgacgttgtcggagtaagcgctggttaaggtgtgggttgtgcctctttggtactgggttgcgtcgttgcactcttaacggtcggacgcgtcgccggaacattgtcacacggttgctctttcgggcagatcaaatccagcattttcagcgtcacgccattggtccagccaaagccatcctgtaatggatattcgccaccgccgccccccgttccggtggtgctgacatcatatttttccaccagctttttctcccggtcataggtgtgctgaacattggtcaggaagtgccagctaatgtccatcgccacctctttttgcccgtagttttgtaatccttctgtcgcgacccactgtaacggtgcccagccatttggcgcatcccattgttgcccacttttcacgctcgtggtgttcaggccgccgggttgcagcagatgtgttttcgtcgccgtcgccattttgttggcgcgatctttcgctgccgcattgacgtacagcgggaacagggcggccgcggttaactgattgcgcactttatgacttttcaggtcgtaatcggcataccagccttgttgatcgttccacaggtatttttcgatccctttttgacgggcatttgccagcgtttcgtactggtttgccatcgcgttatctccggcagctttgctggcgcgggcgaggattttttccattttaaacatcaggctgttcagatcgaccggtacgatgctggtggtgcgtaaggtatttaactgctgcgggttgtccatccagcggctgctgaaatcccagccagacgcagcggcagagcgcaggtcgcggtaaatttcagtggcaggtcgattcggattgcttttggcggtggcaatatcttccacccaactctctggtcgtggcgtatcgcgatcgtcccagtagcggttgagaagggtaccatcctgaagtttgacaacgcgtttttcctgttgtccggcttgcaggttttcaacaccgtccatccagtaagcatattctttttgcatttgcggcaggtattgcttcaacgcggcatcgccttcatgctgcgccagtaactctaccatcagggcaaagaagggcggttggctgcggcttaaatagtaactgcggttgccgttgggaatatgaccgtaagtgtctatttcatgagcaaaattggccaccatatccgcgactttatcccagtgaccgctttcggcaagtcctaacatggtgaagtaactgtcccagtaatatacctcgcgaaagcgtccgcccggcacgacataaggttccggcagcggtaacagagaatcccatttttcggtgttttcggtagaacgcgttaataccggccaaagtccgtcaatatgttcgcgcagactctgcccctctggcggaacatatttctcgccttctttcggcagggtgaaattgacgttaacgaaatggcgcagatcaaatccgctctggttttgctgcatccgataatcagcaaggatcatcagcggatcgctgttcggcacggcatcggcaaaggttttttggtccggaaaaagtttggcgttttgcacatcattaaacagcggccctaataaaatatcaggcggctgtggtgttaccggtgtttcttctgcctgcacgcttagcgcagcgaaacacaaaaagatacaggctggaattaacgccattttttgcgggcgagaaggtgcgggggatttcatcaatcattctcctttggcgaaaccgaataaaacggtattcaagtatcagaaaaccttagttcaggatcgcactagctgcatgatcgaaatctcattctgcgaactgtcaggcattttagaaaagggaattaaagggataaataacggcgaaatagagtgatcaaataacgtctgtttattagccagccagcggcgttgggttcgtgattagcgaagaaaaatcatcataaattggtgaaaaatataacaggtagttaaaaaccattagtgctgagtaaattgccggatgacatcagaacgatgccatccgaacagtggcttaaccctgacggttgaaacgttgcgttttaacgtccagcgttagcgtttcttctggttgtatcgcatacagtttctcaccctgctggcaaatccagccaatccccagttcacgggcgattagggcgctgtgggataccggacttccggcgctaaggcagataccttttacaaccgccggatccagttgcagtactgtggaaggataaatgttctccgccagtagaatagttgggctgttaaactgcgggagttcttctttcgtttgggtcaggtggaccagggtgcgatgcagaagatcgtccacatcaatatagcgagcttgtagatattcatcatccagttgctggtattgctggctaagttctttaagaacttgctgccaggcatattctgccgtgcaatgttcatgctgaaggagttcgcttgccgccgccagcagttccggatcatctaacagtgtatggtgaccagaaaagattgcggcaatatcgtcaagcccgctggcttctgctttcgctgttaacgtcatcagatctaataacgtgaagtcaatagcctggcgtaatcgatcttgttcttcttccacggtcagggtactttttgcctgtaccgtacataaaactggttgataataaaaggctttaccgctaacaggcggaacgggacgcagagtaggtggagcgacttcctccgtttcaccaaagttatcttcagccagctgacggaaagcgatcagtgcctcttcagcttctggccctttcgcaatcaggcgcagcgtatcgttatagcgaacttgtagtaacgcaatctggttaatactctctggtgtgacgcatttgccgtttttttccagcaacatatcggcattaaatgtgcttaaggtataaaccagccgggaggccggacgtacatgcaggccgttacggttttttatgaccaccgccagagaacgggcttcttcatcgtacgcaggacatgtgtcagagatttcagtgtcggaggacggtaaacccagttgttcacgtttggcttccagcgcatgcatggcgtcaaagataactttgtcgatatccgccccgctggccgcgctgaccgttgctgccagtgtaccttcgaccaacggcgcagcacacaaacgtacttttgcggcgatctcgggagccagcaattccagcgcagtttcagcactcaataatgcgctacccatatccatcatgaccagcacatggtcggcatcagcaacagattcgatggcctccatcactttgacggcatcggtaccaatgggattttgtggatcgtcaattcccgcggcaatggcgattttacaactatcactcattaacatctgacgggctaattcaccgacaccttctcccagtcggctgctatgactaactatgaccaggtttaccatcaccaattccttactcttttgcggctaacgccaacatttgcatcataaacatcacgctggtcgcgccgggatcctggtgaccaatactgcgttcaccgagataactggcgcggcctttgcgggcttgcatcgtaatcgtactttgtgcagcggattcggcgatgctactggcagcttcgagcgccaccggaacagagagattttgctcgctggactgacgtaagctttccaccaccggcacccacacatcacacatggttttatcgccaggttcggctttcccgcgactgattacgccgtccgcgccatcgcggaacatctgataaagctcttccagtgtcaggctttgccgtgcctgggtcgcctgtgcggcgcggataaagaaggtaccgaacagcggaccactggcaccaccgacgctggaaagcagcgtcataccggtattcttgagaatgaaaccgatatctttatctgcgatagcagggagtttttccaccactttgctaaagcctcggttcatatttagcccgtggtcagcatcgccaatttcgcgatccagtccggtaagatactcgctctcggtgctgaaaatatcgccacaacgagtgagccagttaacaatttgagttctgctcagactcattgctttctccttatttaccccagttaagggccggggtgtggaccggggcgtcccagagtgccagcgtttcgtcatcaactttcagtaaggtgatactgaaaccggtcatatccagactggtgcagtacgcgccaattaaattacgttcgatagtcaatcccgcttgctggcaacgtgtggtcaggcggttatagacgccgtacagctcagaaagcggagttgcgccaagattgttaaccagcgcaatcacccgatcgccagactggagcggttgtttggtttgttgttcttcctgccaactgccttgttgataatcccagaaacgcaaagtgcgatggtaactgccatttaccagcagggtgtcgaacatttcatcgacggtttgatcaagggaagagaaggggcggcggtcaatacccggctcaccatgaatgccgacgccaaactccatctcattatccgccagggtaaaagaaggtttgcccgcggcaggaacggtacaggcaccgagagcgatacctatactgtggccttgattattcagcttacgccccagttccgcacaggcgtccagactgtcgccacgctccgccgctgcgcctacgagtttttcaattaatacggtgttggcaacgccgcgtcgcccggcagtataaagactgtcttttaccgcaacgtcgtcatcaatgaccacagtggtcacttttacgccgctatcgtgcagtaactcggtcgctgtttcaaagttaagaatatcgccggtgtaatttttgataatcaacagtacaccttcgccgccatcaacttgcatggcgcattcaaagattttatcgggcgtcggactggtgaaaatttcgcccggacaggccccgctaagcatcccctgaccgatataaccacagtgcatcggctcgtgtccgctgccgccaccgctcagcagggcgacttttcctgcaacaggggcatcagctcgggtgacatacaccggatcctgatgcagtgtcaggcttggatgcgctttcgccagtcctgccagttgttcgtccagtacgtcttgcacatcattgatcaattttttcattattttgctccagcaattacggtagggcatggatgatgttcaacgacacggcgaccactgactgccgatgaatccattgtgcatcaggcaagggaaaagaaaattagcccaaattatgtttcatagtgaaacatatgctttaatgaatgttccatattgaaacttttacgtgtattaatacttaaaattgcgagccggaacaccttttgtcataagggatgcgggatatgagtggcgcttttaacaacgatggtcggggcatatctcccttaattgcaacctcctgggagcgatgcaataagctgatgaaacgggagacatggaacgtaccacatcaggcccagggcgtgacatttgcttctatttatcggcgtaagaaagcgatgctgacgctcgggcaggctgcgctggaagatgcctgggaatatatggcaccgcgagagtgtgcgctgtttatcctcgatgaaaccgcctgcattctcagccgtaatggcgatccgcaaaccttgcagcagctaagtgcactgggattcaatgacggcacgtattgcgccgagggaattattggtacttgtgcgctaagcttagcggctatctctggtcaggccgtgaaaacgatggccgatcaacatttcaaacaggtactctggaactgggccttttgtgcaacgccgttgtttgacagcaagggccgattgacgggaacaatagcgctggcgtgtccggttgagcaaactaccgcagctgatttgccgttgacgttggcaatcgcccgcgaggtcggaaatttactgctgacggacagtttgctcgctgaaactaaccgtcatttaaatcaacttaatgccctgttagaaagtatggatgatggcgtgattagctgggacgagcagggtaatttgcaatttattaatgcccaggcggcgcgggtcttgcgccttgacgcgacggcaagtcagggacgggcaatcactgaactcttaacgttacccgccgtattgcaacaagcaataaaacaggcacatccgctcaaacacgtagaagcaacctttgaaagccagcaccagtttattgatgcggtgataacccttaaaccgataatagaaacgcagggaaccagctttattttgttgctccatcctgtggaacagatgcggcagttgatgaccagtcaattaggaaaagtcagccataccttcgctcatatgccacaggacgatccgcaaacccgccgcttgattcattttggtcgccaggcggcgcgcagtagctttcctgtcctgctttgtggagaagagggcgtgggcaaggcactgctaagtcaggcaattcataatgaaagcgagcgtgctgcaggtccttatatcgccgtcaattgtgagttatatggtgatgctgcgctggcggaagaatttattggtggcgatcgcacggacaatgaaaatggccgtctgagtcggctggaactggcacacggcggcacgctgtttcttgaaaagattgaatatctggcggtggagttacagtctgctttgcttcaggttatcaagcagggggttatcacgcgactggatgcgcggcgtttaataccaattgatgtcaaagtgattgcaacaacgaccgcggacctcgcaatgctggtggaacaaaatcgttttagtcgccagctgtattacgcgctgcatgcatttgaaattaccatcccgcctctgcgtatgcggcgtggcagcattccggcgctggtgaataacaaattacgcagtcttgaaaaacgcttctctacgcggctgaaaattgatgacgatgccctcgctcgcctggtttcttgtgcatggccaggcaacgattttgaactttacagcgtcatcgagaatcttgctctgagtagtgataacgggcgcattcgcgtcagtgatttgccggaacatctgtttaccgagcaggcgacagatgatgtcagcgccacccgcctttccaccagtctgagttttgcggaagttgaaaaagaggcaattattaacgcagcccaggtcacaggcggtcgcattcaggaaatgagcgctttacttgggatcggccgcactacgctgtggcggaaaatgaagcaacatggcattgatgcagggcagtttaagcgccgggtatgaaagacagaaacgatttctgatacatcagagtgatctgtatttcattccggcgcacgctaacaattttcagcatcgtttaagggcttgtctatcccgcacttaaaagctgaagcgatatcctccgttgacttgcttctgatcaaagaggttaccctgcgtgtaatccgcttcgagatagaatgtgtgctgtttgttatactgtgcactgactcccacgccgttattccagccattacctttgaaactgtacttctcccgggagttgttcaacagatattcggtatccccactaaactcgcggatagcgccagtcttcacatagacattcagctggctgttgcctgcggtgatgtcataccccagtatcatgctggcacgccccagcaggctttcgtagtgattcagatgtatattgaggccattactcgccttcatagtcatctcattctggtggctgtatgtaagctgggtttgcggctctatatagaacccataaccagtaggggacaggttgaacctctgcccggcttccagggagatgctcattccattcgcagtgccgttggcgttaacgccgttgttctgactgtccagtacgtggaaactatttttctggcggcttgcttttataacgagatcgctgtaaaaaccgttttgtgccatgtaactggcgtacattcccatgtagtcactacgtgcggtaccgtcgcctccgctatagtccgggcttgcatgtgtactgccaatatacagaccgacatacaacggcattacatcagagagacgtttatccccaccaaactggataccgctgtaacccatgtcaaagccgctcagtttgccactggcaaaggagtccaggcttcccccataactgcgcaaccagatattaccgtctttactctgatttcgcaggtcacccatccgttgcatcagcgtacggttttcaacatagttcaataagtaaccgacattgagataattgccgccagcatctgcggtcgtggtgggtttaggcgtgggagcgggttcaggcgtaggatcggggttgactatgggaggctgagcgggagctggtgtgggttcaggattaggagtcggttccggaactgtcccggaagcgtaaagctcccagttagtgccatttttacgcacatcgtacagatatccccccaactcaacctgagaagacgcgctgaagctggccgcgccgtcagtggtttttaccactgtcagaacttcatttcccgttgtggcctcgctgccctggttgcggatagccaatacgtgattaccagcactactcccgctgatattcaataaatcccctttattattaacgccattaccctcgccaacaacatcagcacgcataataaaggtactgttaccgctcaggttctctacgtttaatgtggcaaatgtgccggcagtactcccgtggctggcaaaatcgacagtactatggctcagcgccagcgtgtcgagattagaattacttgttacgttccagacgctgttattcattgcaacgtccagttttccgccattgacattatcgctgagggaggaacctgtccaaacgttcccagggtgcatatccagattgattagcccacctttggaaagaacgctaccgttgataagcatacgaccgctggcgttgatgcggctggcggcataaccatcgtcatgttgcgttgcgatggccatctggtcgggtgtactcatatcaatgaccagatcgctcgtgaggtcgatctggctgttggtcatggcataaattcccctggctcctgccgcgccggtgatagccaaactgtctccggttattctaccgccgctgagagcccacaaacccagcgccagactgccattacgatcaactgtaatatcggtattttgcatgttgacaacagccgttgccgtctgggcgctggcaccataagaaccgccggaaaagatgctgtttcgttgcgctgccgtgccagtaaaattgattatcgcgtcactaccactggtgacgaggccaccgccctgcgcggaagaaatatggctatctgcaccgatagtggttgtaccaccacgaacttcgacgccattggccgcggctccagttacatcaacagtgagtgcattcgcgctaacctggccaaagctccagaggccgtgagcattatcgccattggttttaatggtactgtttgttccgagatcgacaacagagtttttctgtacgtttatccccatggcgctgtagccctgaacatcgattgtcaggtctgtagccgtaaaacgcgcagcaccattggcgttattgccgttgagaccaccgatataaacacctgtacttccatcggtcgtgattttacttccgcttccaagatcgacactggtgccatagtcattgatggttaggcctataccgttgctgttttcaatggtgaattgagtggctgttagtgtactgctatgcccaataatgatgccgtcatcgttactcttaatggtgctgcctgtgcctaagtcagcatgggtatagtcaccaattaagttaatgccgatggcagaggtttgaccaacaacatctactgtgagtcggttagctgtcagggagctgtttttgccctgaataatgattccttttgcatatccagaggcgtcgttgacattgacggtgacatcattacccaggttgatattgccaggcgtgtttcctgctggggtcattacaccatagaggtttccacttggatcggcggtatctcctgtaattctgtcaccatcattaatagtaatattggtgccatattgacttcctgtatcagcagctatcagcaggggggaaaagataattgcattcaaaccaatagcgccaaattttatcagttgaatactggggctacggatttttaattcagcgagacgatctgctttggtattcccattgtgttgtttgatgcccataccactcctatatagtacccagactatgggtctatggattttgtcattttgtttaaatcaatgaataatatcctcttatcatcatgatatttgtatggtgcaatcatgatgagcttctcagagaataattctctattaccgggcaaaatcaggaacacaggaattaatatatatttaacatcccccttacaaaggtgagtttatatcgagttattccctaagttgtcgttacttattccaattcgttactataaatatggcaaaaatattacaacaaacagcggttaaaaaatttggtgaagattttttgtaataatcctaattagttatgggaatttcgcttgatgtatctgcataacaaaaacaatatgcgccatttttgcattactaataagaaaaagcaaaaaacatcgatattcatttttggtcaatgggttttctggcctatcgttgttattgtgctactggttatcattttcatcttgccagcatattggagcgtgatcaattttgatcagctgtgaagggggctgatgtgtagtgatacaaaaacttacgttatatcactgctaatgagatatccggcatctgaacacttatgtctttaattattctcgtggttcactataggcaataagcacaaaagtgtaggatgttacaagaatgattaggactcggtgaaatgaaaaatccacgcaattgcgtggattttatatacttttgcgctcttcatgagatttagcgaaacctcatgagacaataaattaattagacgttgaaaaggaagttcatcacatcgccatctttcacgatgtaatctttaccttctgcacgcattttgcctgcttctttcgcgccttgttcacctttgtaagtgatgaaatcttcaaagctgatggtttgtgcacggataaagcctttttcaaaatcagtatggattttgcccgctgcctgcggcgcggttgctccaaccggaatggtccatgcacgcacttctttcaccccagcggtgaagtaagtttgcaggttcagcagtttataaccggcacggatcacacggttcaggcccggctcttccagcccaagctcctgcataaactcgtcacgttcttcgtcgtccagttcggcaatgtctgcttcaacagcagcacaaaccggaaccacaacagaaccttctttcgccgcgatttcacgcacctggtcaagatatgggttgttttcaaaaccgtcttcgttgacgttggcgatgtacattgttggtttcagcgtcaggaagctcaggtaacgaatagccgctttctcttcagcgcttaaatccagcgcgcgcagcatacctgcattttccaactggggcaggcatttttccaggaccgccagctcagctttcgcgtctttatcgccacctttggctttcttctgtacgcgatgaatcgcacgttcgcaggtgtcgaggtctgccagcgccagttcggtgttgataacttcaatatcgtcagccgggttaactttgccggaaacgtgaatgatgttgtcattttcaaagcagcgaacaacgtgaccgatcgcttcggtttcacggatgttggtcaggaactggttacccagaccttcgcctttgcttgcgccttttaccagaccggcgatatcgacaaattccatggtcgtgggaagcgtacgctgcggttttacgatttcagccagttgatccaggcgaggatcaggcattggtacgacgcctgtgttcggctcaatggtgcagaatggaaagttggccgcttcaataccggctttggtcagcgcgttgaacagggtagatttcccgacgttgggcaaaccgacgataccgcatttgaatcccatgatttaaatcaccttaatatcttaataatcaacctgttattgctaacagattgcagaaatggaaataactttgcctattatacacggcactcggcaaaaatgccgcagacaacgacttattgcgctttaaaggcgtgcaatcggttcgttgctttggtcaagccatctgtaaaccacatttcagtacaacgcgccgcttcgtcaatggcttcatcaattaacttctgttcactaacaggcggtttgcctaacacaaaaccgacaactttatttttatcgcccggatgaccgattccgatgcgtaaacggtgaaagttagggttattacccaatttactgatgatgtctttcagtccattgtgaccaccatggccaccgcccaatttaaatttggcgacgccaggaggcagatccagttcgtcgtgggccaccagaatttcgtccggattaatgcggaaaaaactggccatcgccgcaacggctttgccgctgagattcataaatgtagtcgggactaacaggcggacatcttcgcctccaagagtgactcggctagtataaccaaagaatttagcctcttcgcgcagcggagcgcgcaaacgctctgccagtaagtcaacgaaccaggtaccagcattatgtcgcgttgcggcgtattcagcaccggggttcgccaggccgacaatcaatttaatcgtcacgtttttttgtcctgagtgtgtacataactggcgcgtagtttactggttgcggccccgcttgacaaaaaactgcgtatcaaatgcagataacgtaataattgcctgagtggactattagaaagtcaaggtgttcaggcgtttatttgtaaagttttgttgaaataagggttgtaattgtgatcacgcccgcacataacccactgggtgttgtctatactttacacataaggaagaggggtattccctgttacaacccagaaagttccggaggtgacatatgaaacgcaaaaacgctagcttactcggtaacgtgctcatggggttgggtctggtggtaatggtggtcggcgtggggtatagtatcctcaaccagttaccacagtttaatatgccccagtatttcgcacatggtgcagtgctaagtattttcgtcggtgccattctctggctggcgggtgcccgtgttggcgggcatgaacaggtgtgcgaccgttactggtgggttcgccactatgacaaacgttgccgccgtagcgataatcgccgtcatagctaacaaataatgcagtttgctgaccagtcagtttgcgctgactggtcaatctcgtacttataaatccgccatcgccgcgcgacgattcgggaagaacgccaggcgtcccgggatcggttgaatgccagcgcgagccatagtgcgcagtggctggaattccacgttgcacacgcgcagttcacatccctcgggcagacgcttcacaaaacgctggaacgcatcaagaccaccagcatcaagtaccggaacggcatcccacttcagaatcacaatccgtttgccttcaagacgactctccaggtccgtgaataagccttcagcagcagcaaaaaacagcgggccaataacgcgcagaaccaggacatcgtctggaacatctacgactaccggtgccaggcgagtcatacgtgcgatacgacgcataaacagcaggcttgccagcacgatccccacgctgatggcaataaccatatcaaacaacacggtcaggctcatgcacagcagcatgacgatgatgtcatctttcggcgcatgacgcagcaagtcgaccactttgtgcgcttcactcatgttccacgccaccatcaacagcagggctgccatggcggaaagcggcagccaggagagcagcggtgccagtaccagcagggcaagaataaccagaatagagtggatcaccgcgctgataggggacgttgccccggcacggacgttagcggcagaacgcgcgatggcagctgtagcggtaataccaccaaagaacggagcgataatattccccagtccctgtccaaccagttcgctgttcgccttgtgtttcgtcccggtcataccatccagcaccacggcgcagagcagagattcgattgcgccgagcattgccatactgaatgccgcaggcagcagtgtgcgaatagaatcccaggttagcgtgaattcactattaggcagatcccacggcagcaccagttgcggcagcagttgcggaataccgttaccctgagaaccatcggccaggacgtagtggaattggctaccgatggtagcaacatgtccgccgagcaggttaacaatccccatcaccgcgcaaccagccagcaaggccggaaggtgaccgggtaaacgaatgcccagacgcggccaaaaaacaagaatacctagcgtcacaatgccaatggcagcatcacccacattaatggtcggcagcgccataaataatgcgccgactttttgtagataatgttccgggacatgggccatttgcagaccgagaaaatctttaatctgcatggtaccgatggtgatcccgataccgctggtgaaacctaaggtgacggaaaccggaatatactcaatcaggcgaccaaagcgtgccagacccatcagaatcaaaaagatcccgctcagcaaggtcgcaaccagcagtcctgccagtccaaactgttggctcacgggatagagaattaccacaaatgccgcagtcggaccggaaacgctaaagcgactcccacccgtcagagcaatgacaatccccgcaacagctgcggtatataaaccgtactggggtgccacaccactaccaatagccaacgccatcgccagcgggatagcaataatcccgacggttatcccggcaatcaggtcacgggtaaaccgtgcggcagtatatttttctttccagcaagcgtcgatcagagcgcggaaaggcatcacatgactggaaaatattttgttcacaataatgtttcatccgtgagcgcatcatctgtcaactaaatggcaggtgaaggaggcataggtcatacaaatggatattacagacaaaaaaacccgccgcagcgggtctttgagccgggttcgattagtgttcgaacatggcagagatgctttcttcgttgctgatacgacgaatcgcttcggccagcataccactcagggtcagagtacgcacgttcggcagacttttgatttcatcgctcagcggaatggtatcgcagacaacgacttcatcaattacagagttacgcaggttgttcgccgcgttgccagagaagatcgggtgagtcgcgtacgcaaatacacgtttagcaccacgttctttcagagcttcagcagctttacacagcgtaccgccagtgtcgatcatatcatcgaccagtacgcagtcacgacctgcaacgtcaccgatgatatgcatcacctgactaacgttcgcacgcggacgacgtttgtcgatgattgccatatcggtatcgttcagcagcttagcgatagcgcgggcacgcacaacgccgccgatgtccggagaaaccacaattgggttatccagattcagctgcagcatgtcttccagcaggatcgggctaccaaatacgttatcaaccggaacgtcgaagaaaccctgaatctgttcagcgtgcagatccactgtcagcacacggtcaacaccgacgctggagaggaagtctgcaaccactttcgcagtgattggtacacgagcggaacggacgcgacggtcctggcgcgcatagccaaagtaggggataacagcggtgatacgacctgcggaagcacgacgcagggcatcaaccataacgactaattccatcaggttgtcgttagtaggggcacaagtggactggatgatgaaaatatcaccaccgcgtacattttcattaatttgtacgctgacttcgccatcgctaaagcgacctacagcggcgtcgccgagactagtgtacaggcggttggcaatacgttgtgctagttccggggtggcgttaccagcaaaaagcttcatatcaggcacgagaagaacctcaggcatgcgtccattggtggaaagaatctgccgaaaactgtgcgggccaggcatgatcctttccaggcggtgtattaaagagcgcgatgcaacgtctggaacaaggtgacgttgtcaccgaaactcagcttgcccggcttaaagcatggctctgtgcaatggggaaagattagcgcctttcgccacaaagccattgagccattccggggcttgctctagcacctggcgggcttcagactctgtatcaaattcagcaaagacacaggcccctgtcccagtcaggcggctcggggcgtattctaacagccaggaaagcaccgcatcaacctcgcgaaaacgttttcttgcgataacctcgcaatcattgctgaattcacattttagcaacgtttctatactcctttttggcgtattgcgcgggagttcaggatctttaaaaatcaccggagtcggaatacttacaccagggtgcgccaccagataccacttctctggcggatccaccggcgttagtatttcaccaacgccttcggcaaacgcggcatgcccccgaacaaagacaggaacatctgcgcccagcgtcagccccatttccgccagctcatccatgcttagcccgcattgccagagatgatttaatgccaccaggaccgtcgcggcattggaactaccaccgccgagaccgccgcccatcggcaaacgcttgtcaatgctgatattcgcaccgcttcccgtcggaagacgcccgctgtctgccgcagttttcatcaacaatcgcgctgcgcgaacgatcaggttatcttcatgttccacgccttcaacgggcgttaacagacgaatatccccatcgtcacgaagctcaatgctgatggtgtcgccgtaatcaagaaactgaaacagcgtttgcagcgtgtggtaaccatccgcacgctgaccggtaatgtataaaaacagattaagttttgccggagagggccactgtgtccgcattatttcactatccagttatccatttttaacttgatgcgttgaccaccgtcggtgagttccatattggctggcatcgcaggttgcgttttggtgtcataaccaccataaacaaccttccagtttttgccattctggctgtaggtaatttcgctcaggcggtactggtcgtccagtttgtagtcggttgcatcacccggtaaacctaaaatccactggcgcaagctgttgagcggaattggcattccggtcaatttgccaatcatctcttcggcgtcatcggcggtataacgctgacctttattgtcgactaactgcacgttacccggttgagcattcagctccagttccgtgctgcccaatgggttagtgagcagcagacggtagcgatcctggccggtttgctgccagaaaaagcgggcgtacactttttgttggtcagaaatataagcgaacgcgccgcgagtctgatactgattaagattgcgcacgtcttgctgatgctgacgccattgtgggctatccgggcttttgccaggacctttgggcgtggtaacggaacaggcagtgagcacaagagcagccagcggtagcaggcggataagacgaaaatcgggcaggggcatagtgatgacaagtccttgagatacgttgcagttataacccttaatgctagcgttaccgtccgctatcgtctatgttcaagttgtcttaattgccagaatctaacggctttcggcaattactccaaaagggggcgctctcttttattgatcttacgcatcctgtatgatgcaagcagactaaccctatcaacgttggtattatttcccgcagacatgacccttttagcactcggtatcaaccataaaacggcacctgtaagcctgcgagaacgtgtaagctttagcccggataagctcgatcaggcgcttgacagcctgcttgcgcagccgatggtgcagggcggcgtggtgctgagcacgtgcaaccgcacggaactttatcttagcgttgaagagcaggacaacctgcaagaggcgttaatccgctggctttgcgattatcacaatcttaatgaagaagatctgcgtaaaagcctctactggcatcaggataacgacgcggttagccatttaatgcgtgttgccagcggcctggatagtctggttctgggggagccgcagatcctcggtcaggttaaaaaagcgtttgccgatagccaaaaaggtcatatgaaggccagcgaactggaacgcatgttccagaaatctttctctgtcgcgaaacgcgttcgcactgaaacagatatcggtgccagcgctgtgtctgtcgcttttgcggcttgtacgctggcgcggcagatctttgaaagcctctctacggtcacagtgttgctggtaggcgcgggcgaaactatcgagctggtggcgcgtcatctgcgcgaacacaaagtacagaagatgattatcgccaaccgcactcgcgaacgtgcccaaattctggcagatgaagtcggcgcggaagtgattgccctgagtgatatcgacgaacgtctgcgcgaagccgatatcatcatcagttccaccgccagcccgttaccgattatcgggaaaggcatggtggagcgcgcattaaaaagccgtcgcaaccaaccaatgctgttggtggatattgccgttccgcgcgatgttgagccggaagttggcaaactggcgaatgcttatctttatagcgttgatgatctgcaaagcatcattagccacaacctggcgcagcgtaaagccgcagcggttgaggcggaaactattgtcgctcaggaaaccagcgaatttatggcgtggctgcgagcacaaagcgccagcgaaaccattcgcgagtatcgcagccaggcagagcaagttcgcgatgagttaaccgccaaagcgttagcggcccttgagcagggcggcgacgcgcaagccattatgcaggatctggcatggaaactgactaaccgcttgatccatgcgccaacgaaaagtcttcaacaggccgcccgtgacggggataacgaacgcctgaatattctgcgcgacagcctcgggctggagtaacagtacatcattttctttttttacagggtggaggaggaataatggaatatcaacactggttacgtgaagcaataagccaacttcaggcgagcgaaagcccgcggcgtgatgctgaaatcctgctggagcatgttaccggcagagggcgtacttttattctcgcctttggtgaaacgcagctgactgacgaacaatgtcagcaacttgatgcgctactgacacgtcgtcgcgatggtgaacccattgctcatttaaccggggtgcgagaattctggagcttgccgttatttgttagcccagcgaccttaattccgcgcccggatacggagtgtctggtggagcaggcactggcgcggttgcctgaacaaccttgccgtattctcgatctcgggacgggtaccggggcgattgcgcttgcgctggctagcgagcgcccggactgcgaaattatcgctgtagatcgtatgcctgatgctgtctccctggcacaacgtaatgcccagcatctggcgatcaaaaatatccacattctgcaaagcgactggtttagcgcgctagccgggcagcagtttgcgatgattgtcagcaatccgccgtatattgacgagcaggaccctcatcttcaacaaggcgatgtccgctttgagccgctcactgcgctggttgcggcagacagtggaatggcagacatcgtgcatatcatcgaacagagccgtaacgcgctggtatccggcggctttctgcttctggaacatggctggcagcagggcgaagcggtgcgacaagcatttatcctcgcggggtatcatgacgtcgaaacctgccgtgactatggtgataacgagcgcgtaacgctcggccgctattatcaatgacaagtttttctacactgcttagtgctcatcttattagtatcgcgctttctgttgggctattaaccttacgtttctggctacgttatcagaagcatccacaggcatttgctcgctggacgcgcattgtgccgccggttgtcgatacgctgttactgttaagcggcattgcgttgatggctaaagcgcacatcctgccattttccgggcaggcacagtggctgactgaaaagctgtttggagttatcatttatatcgttttgggttttattgcactcgattatcgtcgtatgcacagtcagcaggcgcgcattattgccttcccgctggcgttggtggtgctgtacatcatcattaaactcgccaccacaaaagtaccgttactggggtaagtcatgagaagcttagctgatttcgaatttaataaagcgccattgtgcgaaggcatgatcctggcttgcgaagcaatccgccgcgattttcccagccaagatgtttacgacgaactggagcgtctcgttagtctggcgaaggaagaaatcagccagcttctgcctttagaagagcagttggaaaaactgatcgcgctgttttacggcgactggggatttaaagccagtcgcggtgtttatcgtctttccgatgcattatggctggaccaggtgttaaagaatcgacagggcagtgcggtaagtttaggtgcggttttattatgggtcgcgaatcgtctcgatttgccgctgctgccggtgattttccctacgcagctgatattgcgcattgaatgtccggatggcgaaatttggctgattaatccttttaacggtgaaagcttaagcgaacatatgctggacgtatggttaaagggaaatatcagcccgagcgcggaactgttttatgaagaccttgatgaagctgataacattgaggtaatccgcaaattgctggatacactcaaagccagcttgatggaagaaaatcagatggagctggcgttacgcaccagcgaagctttattacaattcaaccctgaagatccctatgaaattcgcgatcgcgggttgatttatgcgcaactggattgcgaacacgttgcgttgaacgatttaagttatttcgttgaacagtgtccggaagacccgatcagcgaaatgatccgtgcgcaaataaataacatcgcgcataaacatattgtgctgcattaattaatcgacattttactcaagattaaggcgatcctatgaaacaaaaagtggttagcattggcgacatcaacgtagcaaatgacctgccgttcgtactgtttggcggtatgaacgtgttggaatctcgcgatctggcgatgcgcatttgcgagcactacgtaactgtgacccagaaactgggtatcccttacgtgttcaaagcctcttttgacaaagccaaccgctcctccatccactcttatcgtggaccgggcctggaagaagggatgaaaatcttccaggagttgaagcagacttttggcgtgaaaattatcaccgacgttcacgaaccaagtcaggcacagcccgttgctgatgtcgtggatgtgattcagttgccggcgtttcttgctcgccagactgacctggttgaagccatggcgaaaaccggtgcggtaattaacgtcaagaaaccacagtttgtcagcccgggacagatgggtaatatcgttgataaattcaaagaaggcggcaacgaaaaagtgattctttgcgatcgcggtgctaacttcggctatgacaacctggttgtcgatatgctgggcttcagcattatgaagaaagtgtctggtaacagcccggtgattttcgacgtgacccacgcactgcaatgccgcgatccgtttggcgcagcttccggtggtcgtcgtgctcaggtggctgagctggcacgagccggtatggcggtaggtctggcggggctgtttattgaagcgcatccggatccggaacatgcgaaatgtgatggtccatccgcgctgccgctggctaaactggaaccgttcctcaagcagatgaaagcgattgatgatctggtgaaaggtttcgaagaactggataccagcaagtaatcttttttgcttgaaaaataaagtattagcgttctgcgttaagacttttttcatgggtgccggatacaaaaaaggccgcaggctgttacccctgcggccggtttcgggcgcatattgccatcacggcagcctgacgcccgttttcaccttacttccggttacgccaccagctgacaatcgctgcggtaataattcccgccaggatcggtgctgccaggtcgtgccagaaaatcatggcaaactgcgcgagcgtcatatagccgccttgttgtaatgacaacattttgcggctattcttgaattgttctggttcaagattagcccccgttctgttgtcaggttgtacctctcaacgtgcgggggttttctctttccagcaaccaatgccaccagggataaagcccccgcaacattgcgcctcaccggataacgccggcttggtgtggatactacgactcaattcatcttcacttcatccctgaaatgtttgcaatgaagagtgcattccggtttttcaacagctgttacagtcatttcatgagtgctctggatgaggcttccagctcgggttgccaatatttacttgtggaagtgataaagacaaaaatggccgcaggctgttacccctgcggccggtttcgggcgcatattgccatcacggcagcctgacgcccgttttcaccttacttccggttacgccaccagccgacaatcgctgcggtaataattcccgccaggatcggtgccgccaggtcgtgccagaaagtcatggcaaactgcgcgagcgtcatatagccgccttgttgtaatgacaacattttgcggctattcttgaagtgtctggtttcaagattagcccccgttctgttgtcaggttttacctctcaacgtgcgggggttttctctttccagcaaccaatgccaccagggataaagcccccgcaacattgcgcctcaccggataattccggcttggtgtggatactacgtctcaattcatcttcacttcatccctgaaatgtttgcaataaagagtacattccggcttttcaacagctgttgcagtcgtttcatgagtgctctggatgatgcttccagctcgggttgccaatatttacttgtggaagagataaagacaaaaatggccgcaggctgttacccctgcggccggtttcgggcgcatattgccatcacggcagcctgacgcccgttttcaccttacttccggttacgccaccagctgacaatcgctgcggtaataattcccgccaggatcggtgctgccaggtcgtgccagaaaatcatggcaaactgcgcgagcgtcatatagccgccttgttgtaatgacaacattttgcggctattcttgaagtgtctggtttcaagattagcccccgttttgttgtcaggttttacctctcaacgtgcgggggttttctctttccagcaaccaatgccaccagggataaagccccgcaacattgcgcctcaccggataacgccggcttggtgtggatactacgtcgcaattcatcttcacttcatccctgaaatgtttgcaatgaagagtacattccggcttttcaacagctgttgcagtggtttcgtgcagggtgtggtacaggctcgcaattctgattaacgacctgtccaggtagtatgaagaaatacaataagcaggaatttatattatctcccccgattaccgtcatcggaggagatataactgtcaggcaaatatcgtcatcaaataggcggcaaacagtgccagatgcgctgcgccattgagcatgttagtacgtccggtggagaaggagatatggcacagcactaaagaggccaccatcaccaccatttctggcgcaccaagtgcaaactgcaattcgttacccgtcataaaggcaattagcgtgacgacaggtacggtaaggctaatggttgctaacacactaccaaagaacagattcatcgcgcgctgaacctggttgttcaacactgcttttaatgcacctaaaccttccgggctcagaatcaacagtgccaccaggaagccagtaaaggcgacaggggcattcatgctgtcgagcaatgtctccaggctgctggcgttcattttggtcaccgcaataacggcaatcagatggataatcaaccagatagcatgccacaggctgctatgggcagacggtttaccgtgatgcgggtcgtcatcatcactgtcatcttcgtgctcgtagacaaacaaactttgatgcgttttggtctggatcagcaaaaatacgccatacattgccgcagaaattaatgctaccagtaacgcctgaccggtactaaaattcgccgcaggcagagccattggaaataccagtacgattatcgccagggggaacagcgcaattaaatactgcttgataccaaacagattcatatattgggtggcaaacttacgaccgcccaacaataaactaaagccaaccagcccaccggtaacaatcataatgatactatagagcgtatcacgcattagcgttggcgcggcgtcgccggttgccattaaagcactaatcaaactgacttcaagaataaccacactaaggctaagaataaggctaccgtaaggttctcccaggcgatgggctaatacgtccgcatgacggacaacactaaaggcgctacttaaaataccaataagcgcaagaagattgatggcaatgaccactggtagtgtctggctgcttccccacaggaacagcactaccagcgccagaaccgggaaaataaggctagtctccttgtggcgggtttttaccgcctcttgagcattactcattatggttatccctttgcagatgaatttatcgaaaatgtaaaaaataggtaggaaaaataacagaaagtgtctggatatcggtaacattttacgaatttttaccccgctgtcgattttttactcattggggcataaaaataagtattacgtttagacaatgtttgttttagcgtctcttaagaagagtctgacctgaaaattcttatgttttggcaagagtagatattgttgaccacacttaatgttcaactttgtaaaaggagtcaacgatgccgtataaaacgaaaagcgatctgccggaaagcgtaaagcacgttctaccgtctcatgcccaggatatctataaagaagcgttcaacagcgcatgggatcaatataaagataaagaagatcggcgtgatgacgccagtcgcgaagaaaccgcgcataaagtggcctgggctgctgtgaagcatgaatatgccaaaggggatgatgataaatggcataaaaaaagctaaaaccggtcgcttagttaaagctattcgtgcggtgttgccttgcaagtggtccgtggattgcatattgtcccgttagtggtttcaaaatgagcagtaaaaatgtccggaagacaccaaaaagttgtcgcagggaagtatgcagtggcggaagtgtaaggtgataacgcgtgatttcttgatgaatgccgattgtaaaacggcatttggtgccattgaagaaagtctcttatggagtgcagaacaacgggcggctagcctggcggcgacgctggcttgtcgacctgatgagggaccggtgtggatcttcggctatggaagcttgatgtggaatccggcactggagtttaccgaaagctgcaccggtacactggttggatggcatcgcgcattttgcctgcgcctgaccgccgggcgcgggactgcgcaccagccgggacggatgcttgcactgaaagagggcggacgcaccacaggcgtcgcctatcgactgccagaagagacgctggagcaggaactaaccctgttgtggaagcgagagatgattaccggctgttatctgccaacctggtgtcagcttgatcttgatgatggacgcacagtaaacgccattgtgtttattatggacccgcgacatccagaatatgaatctgatactcgcgctcaggtcatcgcgccgttgattgcggcggcgagcggtccgctgggaaccaacgcacaatacctgtttagtctggaacaggagcttatcaaactgggaatgcaggacgatgggctgaatgatttgctggtaagcgtaaaaaaactgctggcggagaattttccggatggtgtgttacgtccgggattcgcctgagtaaacttcccgcatagtggggcgtcagacgccccctcaaacattaaaatgtgagcactttatcggcactcagcgtccattgcgccagttccacaagagtaccgatttccaccccatcaatcagaggaagtgtactaatcccgcgcccgtcggtacaggttttgcacaatttcaccggtacattctgagcggtaaggatctccagcatttgctgaatgttgtagccttcccctggtttttgcccgcgcaacccggctgtgaccgcatcagacatgaggaacagacgcagatccagattgctctcctgctctcgtaacgcaatggccagccgcaagctgttaaacaaggattcgctcccgtaaggtgcgccattggcaacgatcacgattttttgcattatttactcctgtattcagggaattagacactcatcttctatcttactgcttctgcagcgtctgaccaatcggtcacatttttaaggattttcctgaaagcgcgagaaaatacgacaaaagttgccagtaatcgttattctttaaggctatggtttttcattattaccggaagttaccgacgttttgagccgtttcgttcctcgcattatcccgttttatttactcttgcttgtagcaggcggtacagctaacgcacaatctaccttcgagcaaaaagcggcaaatccctttgataataacaatgatggtctgccggatttaggcatggctcccgaaaatcatgatggggaaaaacactttgctgaaattgtgaaagatttcggcgaaaccagtatgaatgataacgggctggatactggcgagcaggcaaaagctttcgcattgggaaaagtccgcgacgcgcttagtcaacaggttaatcagcacgtagagtcctggctaagtccgtggggaaatgccagtgttgacgtcaaagtggataacgaaggacatttcaccggcagtcgtggaagctggtttgtgccgttacaagataatgatcgttatctcacctggagccagcttggtcttactcagcaggataatgggttggtgagcaatgtgggcgttgggcaacgctgggcgcgcggcaactggctggtgggttataacactttttatgacaacttgctggacgaaaatcttcagcgagcgggctttggtgccgaagcgtggggcgaatatttgcgattaagcacaaacttttatcagccgtttgctgcatggcatgaacagacagccacgcaggaacaacggatggcgcgcgggtacgacctgacagctcggatgcgcatgccgttctatcaacacctcaataccagtgtcagcctagaacagtattttggtgatcgtgttgatttgtttaactctggtacgggttatcacaatcccgtcgcgttgagtctgggattaaattacacccctgtgccattagtcactgtgacggcccagcataaacagggtgaaagtggcgaaaatcaaaataacctcgggctgaatcttaattaccgctttggtgtaccgctcaaaaaacaactttctgcgggcgaggttgccgaaagtcagagcttacgtggtagtcgctatgacaatccgcagcgaaataatctaccgactcttgagtaccgacagcgaaaaacgttaacggtgtttctggcgacaccgccgtgggatctaaaacctggcgaaacagtgccgctgaaattacaaatccgcagtcgttacggtattcggcaactgatttggcagggcgatacgcagatattaagtttgacgccgggcgcacaagccaacagcgcggagggctggacgctgatcatgcctgactggcagaacggggaaggggcaagcaatcactggcgattgtctgtggtggtggaagataaccaggggcagcgtgtctcctccaatgagatcacgctaacgcttgtcgaaccgttcgatgcattgagtaacgacgaactgcgctgggaaccgtaatcagaaaatgcgctcctgatgcacccataccgctgcttccacgcgagacttgagcttcattttcttcagcatgtgcttgacgtgcacttttactgtgctttcggtgatatccaggcggcgggcaatcatcttgttcggcaaaccctgggcaatcagcttgagaatatcgcgctcgcgtggggttaactggttaacatcgcgctcagtagtggcacggttagcgcgcaagctggcggccagaacaggcgttaatgcttcgcttaataccatttcgccagcagctgcctgatgcaatgctttcagcagatcttccggttccatatcttttaacagatagccatccgcgccgcgtttcagtgcggtgaccacatcttcttcatggttagagacgctgaataccacaatgcgcccactgagggacttttcgcgcagtttatccagcgtttccagaccgttcatgccgggcatattgagatctaacaggatcagatcgggatcaagagactccgccagttcaataccctgttcgccattactcgcttcgccaaccacggtgatatctggtgccatactgataagctgttttacgccagttcgcagcatcgggtgatcgtcaatcagcaggatagtagccggttcctgattactcatgggtatctccttggacgtctgtgaaagttttttcgggaataaaggtgaccaccacttcggtgccaccactttcacgacggcggacgcggcaatcgcctcgtaaactttgcgcacgatcgcgcattattatcatgccgtagtgattgctgcggatggcattttcaggcacgccgcagccgttatcctggacggtcagtttgacctgattatcgttttgcgccaccgtcaccacgacttcactcgcttggctatgtttgagggcgttacttaatgcctcacgggcaatttgcaacaagtggattgcctgatggctaggcaccaggcgaggcggcaattgataatccagcttcaccgggaagccaaatttggcgctgtactcttcgcaactcgcctccagcgccggacgtaatccaggctcggtgagctgcaagcggaatgtggtgagcaattcacgcaactgcgcccaggatgcattcagttcgttacggatctgacttaacagttcgcggctgctttctggcagcgcatcgccctgcatctgtaaacaactcacctgcatcttcatgcaagagagagattgggcaatagaatcatgcagttcgcgcgcaatggtggcacgctcttccatcacgatcaactgttgctgacgttcctgatggcgatccagcgccagcgtggcggtgagttgttcaaccagggtatccaccagttgttgttgatcatggctaagatgacgcccctgcggcagggtcgccagcaaaataccgtactgcgtatgagagtcagccagccgccacttcagggtcgtgccgcgatcaccaacgggtaatacgccgcgcgggcagagctggcagcctttatcatcacaagtcatatctggctggcaggtaaactcctgatgattctcttcatcatcagtgtcatacacccgcaattcgatatcacgtagcagggttaaattctgtaagccgttgagtacaggactcaggcgttcacacagcggggcgcgggaatgcaaacggcggttagcctgccataaaaaagagaggatctgatttttatgctccagcccggcggttttctcctgaacccgctgctcaagtacggcataactttcggccagttctgcagacatattgttcaacgcagttccaagcatcgccatttcgttgcgcccgctgatgtttgcgcgttgggtaaaatcgcgatgactgacggcactcgccattgccagcagttgccgccacggttgtagcagtcgcgcccgcaaccagataatagtgaacaccagtaaaagtgccataaataccgccattacccgatggaccagtaccactgtctcgatgcgcatttccgtggtgcggtcaaaaccagataccagttgatcaagcccggcaacaaactggctgacatccgcactcaccgtttctcggttttgtgcacgcatcagcgcagggatcagttcattacgccagtaatcttgtaaaccctgtaattgcgccagttgtccgtctcgttctgctgctcgagtcaactcggcgctaaatgccgtttgttccatctctttaattaagggcttgtctttctcgcttaatggcactgccgccaacagacggtaactttgcatgcgcaggcttcccgctttgttgatcgcatgggcgctgccctgaacgccttgcaccagccagccagaaaccgccatccctgccagtccaatagcagtagaaagcaacacaataagcgcaacctgattaaccagggtgagcggagagagacaacgtttaagcatgtaaacctcttccttcaggctttaaatgagcaataaccttaatgaatgtgacgatacattctggaatggcagtattctcggctattggctgaagtatacccatacccggaaagagttactccttatttgccgtgtggttagtcgctttacatcggtaagggtagggattttacagcaccgtgaaaaatctcataatttttatgaagtcactgtactcactatgggtaatgataaatatcaatgatagataaagttatcttatcgtttgatttacatcaaattgcctttagctacagacactaaggtggcagacatcgaaacgagtatcagaggtgtctatgagtcacagttccgcccccgaaagggctactggagctgtcattacagattggcgaccggaagatcctgcgttctggcaacaacgcggtcaacgtattgccagccgcaacctgtggatttccgttccctgtctgctgctggcgttttgcgtatggatgttgttcagcgctgttgcggtgaacctaccgaaagtcggctttaattttacgaccgatcagctatttatgttgactgcgctgcctagcgtttctggcgcgttattacgtgttccatactcctttatggttcctatcttcggtggtcgtcgctggacggcgttcagcaccggtattctgattattccttgcgtctggctgggttttgccgtgcaggatacctccacgccttatagcgtcttcatcatcatctctctgctatgcggctttgctggcgcgaacttcgcatccagtatggcaaacatcagcttcttctttccgaaacagaagcagggtggcgcgctgggtctgaatggtggtctgggaaacatgggcgtcagcgtcatgcagttggttgctccgctggtggtaagtctgagcattttcgcagtatttggtagccagggcgtcaaacagccggatgggactgagctgtatctggcgaatgcgtcctggatatgggtgccgttccttgccatcttcaccattgcggcgtggtttggcatgaacgatcttgctaccagcaaagcctccatcaaggagcagttgccggtactcaaacggggtcatctgtggattatgagcctgctgtatctggcaaccttcggctccttcatcggcttctccgcgggctttgcaatgctgagtaaaacgcagttcccggatgttcagattctgcaatacgctttcttcgggccgtttattggtgcgctggcgcgttctgcaggtggtgcattatctgaccgtctgggcggaactcgtgtcacgctggtgaactttattctgatggcgattttcagcggcctgctgttcctgaccttaccgactgacgggcagggcggaagcttcatggcgttcttcgcggtcttcctggcgctgttcctgacagctgggctgggtagtggttccactttccagatgattagtgtgatcttccgtaaactgacaatggatcgcgtgaaagcagaagggggttctgacgaacgtgcgatgcgtgaagcggcaaccgacacggcggcggcgctgggtttcatctctgcgattggcgcgattggtggcttctttatcccgaaagcgtttggtagcagcctggcattaacgggtagcccagtcggcgcaatgaaggtatttttgattttctatatcgcctgcgtagtgattacctgggcggtatatggtcggcattctaaaaaataaaccgttactcgtcatacttcgggttacatgtgctgcggctgcgttcattcaccccagtcacttactttagtaagctcctgggattcattcacttgccgccttcctgtaaaccgaattatatagagtaaaatatttgattatcctttgcgcggcatgatgtcgcgctttttttatgcgtcatttagttacaacatactaatgttatatggtttatttcgccggatttcattaagagccattaatatgttacccatggggaatactccttaatacccatctgcataaaaatcttaatagtttaaataactacaggtataaaacgtcttaatttacagtctgttatgtggtggctgttaattatcctaaaggggtatcttaggaatttactttatttttcatccccatcactcttgatcgttatcaattcccacgctgtttcagagcgttaccttgcccttaaacattagcaatgtcgatttatcagagggccgacaggctcccacaggagaaaaccgatgagtaaattcctggaccggtttcgctacttcaaacagaagggtgaaacctttgccgatgggcatggccagcttctcaataccaaccgtgactgggaggatggatatcgccagcgttggcagcatgacaaaatcgtccgctctacccacggggtaaactgcaccggctcctgcagctggaaaatctacgtcaaaaacggtctggtcacctgggaaacccagcagactgactatccgcgtacccgtccggatctgccaaaccatgaacctcgcggctgcccgcgcggtgccagctactcctggtatctttacagtgccaaccgcctgaaatacccgatgatgcgcaaacgcctgatgaaaatgtggcgtgaagcgaaggcgctgcatagcgatccggttgaggcatgggcttctatcattgaagacgccgataaagcgaaaagctttaagcaggcgcgtggacgcggtggatttgttcgttcttcctggcaggaggtgaacgaactgatcgccgcatctaacgtttacaccatcaaaaactacggcccggaccgtgttgctggtttcagcccaattccggcaatgagcatggtttcttacgcaagcggtgcacgctatctcagcctgattggcggtacttgcttaagcttctacgactggtactgcgacttgcctcctgcgtctccgcaaacctggggcgagcaaactgacgtaccggaatctgctgactggtacaactccagctacatcatcgcctgggggagtaacgtgccgcagacgcgtaccccggatgctcacttctttactgaagtgcgttacaaagggaccaaaactgttgccgtcacaccagactacgctgaaatcgccaaactgtgcgatctgtggctggcaccgaaacagggcaccgatgcggcaatggcgctggcgatgggccacgtaatgctgcgtgaattccacctcgacaacccaagccagtatttcaccgactatgtgcgtcgctacaccgacatgccgatgctggtgatgctggaagaacgcgacggttactacgctgcaggtcgtatgctgcgcgctgctgatctggttgatgcgctgggccaggaaaacaatccggaatggaaaactgtcgcctttaataccaatggcgaaatggttgcgccgaacggttctattggcttccgctggggcgagaagggcaaatggaatcttgagcagcgcgacggcaaaactggcgaagaaaccgagctgcaactgagcctgctgggtagccaggatgagatcgctgaggtaggcttcccgtactttggtggcgacggcacggaacacttcaacaaagtggaactggaaaacgtgctgctgcacaaactgccggtgaaacgcctgcaactggctgatggcagcaccgccctggtgaccaccgtttatgatctgacgctggcaaactacggtctggaacgtggcctgaacgacgttaactgtgcaaccagctatgacgatgtgaaagcttataccccggcctgggccgagcagattaccggcgtttctcgcagccagattattcgcatcgcccgtgaatttgccgataacgctgataaaacgcacggtcgtagcatgattatcgtcggtgcggggctgaaccactggtatcacctcgatatgaactatcgtggtctgatcaacatgctgattttctgcggctgtgtcggtcagagcgggggcggctgggcgcactatgtaggtcaggaaaaactgcgtccgcaaaccggctggcagccgctggcgtttgcccttgactggcagcgtccggcgcgtcacatgaacagcacttcttatttctataaccactccagccagtggcgttatgaaaccgtcacggcggaagagttgctgagtccgatggcggacaaatcccgctataccggacacttgatcgactttaacgtccgtgcggaacgcatgggctggctgccgtctgcaccgcagttaggcactaacccgctgactatcgctggcgaagcggaaaaagccgggatgaatccggtggactatacggtgaaatccctgaaagagggttccatccgttttgcggcagaacaaccagaaaacggtaaaaaccacccgcgcaacctgttcatctggcgttctaacctgctcggttcttccggtaaaggtcatgagtttatgctcaagtacctgctggggacggagcacggtatccagggtaaagatctggggcaacagggcggcgtgaagccggaagaagtggactggcaggacaatggtctggaaggcaagctggatctggtggttacgctggacttccgtctgagcagcacctgtctctattccgacatcattttgccgacggcgacctggtacgaaaaagacgacatgaatactagcgatatgcatccgtttattcacccgctgtctgcggcggtcgatccggcctgggaagcgaaaagcgactgggaaatctacaaagccatcgcgaagaaattctccgaagtgtgcgtcggccatctgggtaaagaaaccgacatcgtcacgctgcctatccagcatgactctgccgctgaactggcgcagccgctggatgtgaaagactggaaaaaaggcgagtgcgacctgatcccaggtaaaaccgcgccacacattatggtcgtagagcgcgattatccggcgacttacgaacgctttacctctatcggcccgctgatggagaaaatcggtaatggcggtaaagggattgcctggaacacccagagcgagatggatctgctgcgtaagctcaactacaccaaagcggaaggtccggcgaaaggccagccgatgctgaacaccgcaattgatgcggcagagatgatcctgacactggcaccggaaaccaacggtcaggtagccgtgaaagcctgggctgccctgagcgaatttaccggtcgtgaccatacgcatctggcgctgaataaagaagacgagaagatccgcttccgcgatattcaggcacagccgcgcaaaattatctccagcccgacctggtctggtctggaagatgaacacgtttcttacaacgccggttacaccaacgttcacgagctgatcccatggcgtacgctctctggtcgtcagcaactgtatcaggatcaccagtggatgcgtgatttcggtgaaagcctgctggtttatcgtccgccgatcgacacccgtagcgtgaaagaagtgataggccagaaatccaacggcaaccaggaaaaagcgctcaacttcctgacgccgcaccagaagtggggtatccactccacctacagcgacaacctgctgatgctgactttaggtcgcggtggtccggtggtctggttgagtgaagccgatgccaaagatctgggtatcgccgataacgactggattgaagtcttcaacagcaacggtgctctgactgcccgtgcggttgtcagccagcgtgttccggcagggatgaccatgatgtaccacgcgcaggaacgtatcgttaacctgcctggtagcgaaattacccaacagcgtggtggtatccataacagcgtcacccgtatcacgccgaaaccgacgcatatgatcggcggctatgcccatctggcatacggctttaactactatggcaccgtaggttctaaccgcgatgagtttgttgtagtgcgtaagatgaagaacattgactggttagatggcgaaggcaatgaccaggtacaggagagcgtaaaatgaaaattcgtagtcaagtcggcatggtgctgaatctcgataagtgcatcggctgccacacctgtagtgttacctgtaaaaacgtctggaccagccgtgaaggcgtggaatatgcgtggttcaacaacgtggaaaccaagccgggccagggcttcccgactgactgggaaaaccaggaaaaatacaaaggcggctggatccgtaaaatcaacggcaaactgcagccgcgcatgggtaaccgtgccatgctgctgggtaaaatcttcgctaacccgcatctgccggggatcgacgattattacgagccgttcgattttgactatcagaacctgcataccgcgccggaaggcagcaaaagccagccgattgcccgtccgcgtagcctgattaccggggaacggatggcgaaaatcgaaaaagggccgaactgggaagatgacctgggcggtgagtttgacaaactggcgaaagacaagaacttcgacaacatccagaaggcgatgtatagccagttcgaaaacaccttcatgatgtatttgccgcgcctgtgcgaacactgcctgaacccggcatgtgtggcgacctgcccgagcggtgcgatttacaagcgtgaagaagatggcatcgtcctgatcgaccaggataaatgccgtggctggcgtatgtgcatcactggatgcccgtacaaaaaaatctacttcaactggaagagcggtaagtctgagaagtgcatcttctgctatccgcgtattgaagcgggtcagccgaccgtgtgcagtgaaacctgtgtcggtcgtatccgttatcttggcgtgctgttgtacgatgccgacgctattgaacgtgcagccagcaccgagaacgagaaagatctttaccagcgtcagctggacgtgttcctcgatccgaacgatccgaaagtcatcgagcaggcgattaaagacggtattccgctgagcgttattgaagccgcacagcagagcccggtttataaaatggcaatggaatggaaactggcgctgccgctgcatccggaatatcgcacactgccgatggtctggtacgtgccgcctctgtctccgattcagtctgcagcagacgcgggtgagctgggtagcaacggcattctgccagacgtcgaaagcctgcgtattccggtacagtatctggcgaatctgctgaccgccggtgataccaaaccggtactgcgcgcactgaaacgtatgctggcgatgcgtcattacaaacgtgctgaaaccgttgacggtaaagttgatacccgtgcgctggaagaggtcggtctgaccgaagcccaggcacaggagatgtaccgttatctggcgattgctaactacgaagatcgctttgtggtgccgagtagtcatcgtgaactggcacgggaagccttcccggagaaaaatggctgcggctttacctttggtgatggctgccacggtagtgataccaaattcaatctgttcaacagccgtcgtatcgatgccatcgatgtgaccagcaaaacggagccgcatccatgatcgaactcgtgattgtaagccgtctccttgaatatccggatgctgccttatggcagcatcaacaagagatgtttgaggcgattgccgcgagcaaaaatctgccaaaagaggatgcccatgcgctgggcattttcctgcgcgatttaacgacgatggatccgctcgatgcccaggcgcagtacagcgaactgttcgaccgtggccgcgccacgagtctgttgctgtttgaacatgtgcacggcgaatcccgcgaccgcggccaggcgatggtggacctgctggcgcagtacgagcagcacggcttgcagttaaacagccgcgaattgccggaccatctgccgctgtatctggagtacctggcgcagctgccgcaaagcgaagccgtggaaggtttgaaagatatcgcgccgattctggcattgctgagcgcgcgtctgcaacagcgtgaaagccgttatgccgtgctgtttgatctgctgctgaaactggcgaataccgctatcgacagcgacaaagtggcggaaaaaattgccgacgaagcgcgcgatgatacgccgcaggcgctggatgctgtctgggaagaagagcaggttaaattctttgctgacaaaggctgcggtgatagtgcaatcactgcgcatcagcgtcgctttgccggtgccgtcgcgccgcaatatctgaatatcaccaccggaggacagcactaatgcaattcctgaatatgttcttctttgatatctacccgtacatagccggggcggtcttcctgattggtagctggctgcgttatgactacgggcagtacacctggcgcgcggcgtccagccagatgctggatcgcaaagggatgaacctggcgagcaacctgttccatatcgggattctggggatttttgtcggtcacttcttcggtatgctgacgccgcactggatgtatgaagcctggctgccgattgaagtgaaacagaaaatggcaatgtttgctggtggtgccagcggcgtgctgtgtctgattggcggcgtgctgttgctgaaacgtcgtctgttcagcccacgcgtgcgtgcaaccactaccggagcggatatcctgatcctgagcctgctcgttatccagtgcgcgctgggcctgttgaccattccgttctccgctcagcatatggacggtagcgagatgatgaaactggttggctgggcgcagagcgtggtgaccttccacggtggcgcttctcaacacctcgatggtgtggcgtttatcttccgtctgcacctggtgctggggatgacgttattcctgctgttcccgttcagccgtctgatacacatctggagcgtaccggtggagtatctgacacgtaagtaccagctggtgcgcgctcgtcactaagcgaattttagttcacatagaccctgcttcggcggggtttttttatgggcacggtgcggggtgagttgtcggatgcgcttcgcttatccgacctacaggggaggatattgtaggcccggtaaacgtggtgccatcgggcaaaattagctcggagtaacaggttttgattatttaaggaagcgatggtggtgggggaaggattactcagcgctgcgcgcttcgcccttcgggtcgttgcctgcggcaacgctctcagcctggcgctcaagagcaaccttggtcgaagcttcagttccttccccgcttgggcagaatatttgattgcggatagctttgagaattccggggcttttgaaagtgatggtggtgggggaaggattactcagcgctgcgcgcttcgccctagcggtcgttgcctgcggcaacgctctctcgctgacgctcgagccgaaccttaatcgaagcttctcatccttccccgcatgggcagaatatttgattgcggattcgcttgagagttcagggacttttgaaagtgatggtggtgggggaaggattactcagcgctgcgcgcttcgcccttcgggtcgttgcctgcggcaacgctctctcgctggcgctcgagtgctaccttggtcgaagcttctcatccttccccgcatgggcagaatatttaattgcggattcgttgggaagttcagggacttttgaaagtgatggtggtgggggaaggattcgaaccttcgaagtcgatgacggcagatttacagtctgctccctttggccgctcgggaaccccaccaggggtaattcaaattttgaggtaatgcttgagatggtggtgggggaaggattattcgtcgcttcgctcctcacccttcgggccgttgcctgtggcaacgttctctcgctttcgctcgaatcgaaccttagtcgaaggttctcacccttccccgatgagtgcaaactttcacaatctcaccgaagttaccacatcgctgtggtgaattatggtggtgggggaaggattcgaaccttcgaagtcgatgacggcagatttacagtctgctccctttggccgctcgggaaccccaccacggggtaatgctttttactggcctgctcccttatcgggaagcggggcgcatcatatcaaatgacgcgccgctgtaaagtgttacgttgagaaaaatgaactggttgcgtaattttcatccgtaacggattaaaggtaaccagttatttttgctggcgattaaagaataatcgttcgattaccgtaaacaaagacgcgctgtgccagtactttgtatagtgcacgacttaagacgtttttctcgacgtcacgacctgcgcgcatcatatcttcagctgtgtaggtatgatcgacatgaataacgtcctgcatgatgattgggccttcgtccagattgtcattcacatagtgagcggttgcgccaataatcttcacaccacgttcataggcctggtgataaggacgtgcgccaataaacgctggcaggaaactatggtgaatattgatgatcttattcgggaagcgtgccacaaattccggcgttaatacccgcatatacttcgccagcaccacgtagtcaggttgataagcatcaatggcatccgccatcttttgatcgtgctcgttgcgggttaacccttcatggcttaccagctcaaacggaatatcaaaacgctcaaccagagaacgtaaagtatcgtggttaccaataactgccgcgatttcgacatccaggccgccgtaattggctttcatcaacaaatcgccaaggcaatgcgcttctttagtgaccagaatcactatccggcgacgaccggcaggattcagctcacgcacggagccttctggcaatgcgctatcgagatccgccagcagggtggaatcattaaaaatcccttccagttccgtgcgcataaaaaagcgcccggtacggtgatcaacaaattcattgttctgtacgatatttaactcgtgcttgtagcaaatattggtaatacgtgcgatcagacctttttggtccggacaaatagtacgcagaactttacgttggagactatgcattgctggaaaaaccttgttgagagtgtttgctaaaccgtaccgtcaaccattattggccgcagcactttttaaattttttaccactaccacaagggcagggatcgttgcgaccaaactgcggacgtgtaccgtcaatatagtaccattgaccgttttctttcaaaaatcggctacgttcaattattgcacctgttttaccaccttcggtaaatcgagcaacaaaactgacaaatccgatattgtcggcgtcctgccaacaatgttcaaatacggtcaatcccaaccattcagtatgcgcaaatccggccatcaattcggcacgtaacgccgctgctccacaagagggatgccaggtctttattaaataatctgcgtcttgcatcacaaaagcgcagtaacggctacgcatgagatgttctggatcaggtgcaaccttttcaccagacacataagggtggcaacataggctatactcgacagcactaccacagggacaaagctgagacacaaataatctccctggaaacaataacggcgtattaaccgcctgagtagcactatgttaaccgagcagtagcgatgtggctacgattgcattccaggggaatcttgcgggaataatgagaaagataaaaatagggctggcgctgggatctggcgcggcgagaggttggagccatattggcgttattaatgcgctaaaaaaagtgggtattgaaattgatatcgttgcaggatgtagtattggtagcctggtgggcgctgcctatgcatgcgatcgattatctgcgctggaagattgggtgacctctttcagttattgggatgttttacgcctgatggatctctcctggcagcgcggtgggttactgcgcggcgagcgtgtcttcaatcaataccgcgaaataatgccggaaacagagatcgaaaattgttcccgtcgctttgcggctgttgccaccaatttaagtacgggacgtgaattatggtttactgaaggcgatctccatcttgctattcgcgcaagttgcagtattccaggactcatggcacctgttgcacataacggctactggctggttgatggagcagtcgttaacccaattcctatttccctcacgcgtgcattgggggctgatattgtgatagcggttgacctgcagcacgatgctcatttgatgcaacaagatttgctctcctttaatgtcagtgaagaaaatagcgagaatggtgattctctgccgtggcatgcgcgtctgaaagaaaggttaggcagcataacgacacgtcgggcggtgacagcgccaacggcaacagagattatgaccacttctatccaggtgctggagaaccgccttaaaaggaaccgcatggcaggtgatccgcccgatattctgattcaacctgtttgcccgcaaatatctacgcttgatttccatcgcgcgcacgctgccattgcggccggacagctggcagtggaaaggaaaatggacgaacttttgccgttggtacgcaccaacatttgaccagaatttttatctacacttaagttaattctgacaggcgcaggtggcaatagcatgccactattgagtaaagccagtcaggggagagaacatgacgcagccattggtcggaaaacagattctcattgttgaagatgagcaggtatttcgcagccttctggatagttggttttccagtttgggagcgacaacggtactggcggctgatggggtggatgcccttgagttgctgggaggtttcactccagacctgatgatatgtgatatcgcgatgccacgaatgaacgggcttaaactgctggagcatatacgtaacagaggcgaccagaccccagttctggtgatatctgccactgaaaatatggcagatattgccaaagcgttacgtctgggcgttgaagatgttttgctgaaaccagttaaagatctgaatcgcttgcgcgagatggtttttgcctgtctctatcccagcatgtttaatagccgcgttgaggaagaggaaaggctttttcgcgactgggatgcaatggttgataaccctgccgcagcggcgaaattattacaggaactacaaccgccggttcagcaggtgatttcccattgccgggttaattatcgtcaattggttgccgcggacaaacccggcctggtgcttgatattgccgcacttagcgaaaacgatctggcattttattgccttgatgtcacccgagctggacataatggcgtacttgctgccttgttattacgcgcattgtttaacggattattacaggaacagcttgcacaccaaaatcaacggttgccagagttgggcgcgttattgaagcaggtaaaccatttacttcgtcaggccaatctgccggggcagtttccgctattagttggctattatcatcgcgaactgaaaaatctcattctggtttctgcgggtctgaatgcgacgttaaataccggcgaacaccaggtgcaaatcagtaatggtgttccgttaggcactttaggtaacgcttatttgaatcaattgagccagcgatgcgatgcctggcaatgccaaatatggggaaccggtggtcgactgcgcttgatgttgtctgcagaatgagcaaacgataacgcgggctaaatttgcattacctgctaatgtcggctggtggtactatcgtcgccattcgtataagtaattgtcttaattatgctaactcgcctccttttcagaacttagccccttcggggtgctgatatactgggatgcgatacagaaatatgaacacgttcaaaacacgaacagtccaggagaatttaaatggctgccattaatacgaaagtcaaaaaagccgttatccccgttgcgggattaggaaccaggatgttgccggcgacgaaagccatcccgaaagagatgctgccacttgtcgataagccattaattcaatacgtcgtgaatgaatgtattgcggctggcattactgaaattgtgctggttacacacagttctaaaaactctattgaaaaccactttgataccagttttgaactggaagcaatgctggaaaaacgtgtaaaacgtcaactgcttgatgaagtgcagtctatttgtccaccgcacgtgactattatgcaagttcgtcagggtctggcgaaaggcctgggacacgcggtattgtgtgctcacccggtagtgggtgatgaaccggtagctgttattttgcctgatgttattctggatgaatatgaatccgatttgagtcaggataacctggcagagatgatccgccgctttgatgaaacgggtcatagccagatcatggttgaaccggttgctgatgtgaccgcatatggcgttgtggattgcaaaggcgttgaattagcgccgggtgaaagcgtaccgatggttggtgtggtagaaaaaccgaaagcggatgttgcgccgtctaatctcgctattgtgggtcgttacgtacttagcgcggatatttggccgttgctggcaaaaacccctccgggagctggtgatgaaattcagctcaccgacgcaattgatatgctgatcgaaaaagaaacggtggaagcctatcatatgaaagggaagagccatgactgcggtaataaattaggttacatgcaggccttcgttgaatacggtattcgtcataacacccttggcacggaatttaaagcctggcttgaagaagagatgggcattaagaagtaacatccgtatcggtgttatccacgaaacggcgttgagcaatcgacgccgtttttttatagcttattcttattaaattgtcttaaaccggacaataaaaaatcccgccgctggcgggattttaagcaagtgcaatctacaaaagattattgcttgatcaggaaatcgtcgagggatttaccttgctcatccattgcttttttgattacagctggagtacggccttggccagtccaggttttagtttcgccgttttcgtcaacgtagctatattttgccggacgctgagcacgtttagctttggtgccagatttaacggcagcaaggctattcagcagttcgttcgggtcaataccgtcagcgatcagcatttcgcgatattgctgcagtttacgagtgcgctcttcaacttcagcagcagccgcgctttcttcttcgcgacgttcgttaacaacaacttctaatttttccagcatttcttccagcgtttcaagtgtacattctcttgcctgcgcacgaagagtacggatgttgttcagaattttaagtgcttcgctcattgtagtaatctcaaacttatattggggtggtttgttgaggtaataatagagccttaaattcagttgtgcaatagccaggaatgtaaggaattcaaaattgttctttattttgtgccgccaataaatatcttttcataaaattagccagaaaagacgcggcatatagccctatttacaccgatgatttcgcagcacgtgaggttaaaacttcctgattcatgtcacattttatggggagattatcgtaggctgacgacctttcagtcttctgtattagttgtgtttacgagaattccctattaagcgaatgatgaaaagtagaacagtcgcaataagagcatggacttagtattgcactatctcctggaggtcaacagagggctattacttgcgcaacaggttaaagattgtgaatagttaccagcagtcatttacccgcttataacaagcgaggcagttgtaatgatagctcagaaggattatgcaaggcttcgtaagggagaacgcatatacccacttctgtgcatactgttgagctgaaaaactgacgaattatgataaactccagccaactttatttcatatcattgagggcctgtggctgatggcacagctatatttctactattccgcaatgaatgcgggtaagtctacagcattgttgcaatctagttacaattaccaggaacgcggcatgcgcactgtcgtatatacggcagaaattgatgatcgctttggtgccgggaaagtcagtagccgtataggtttgagtagccctgcaaaattatttaaccaaaatagtagtttatttgatgagattcgtgcggaacatgaacagcaggcaattcattgcgtactggttgatgaatgccagtttttaaccagacaacaagtatatgaattaagcgaggttgtcgatcaactcgatatacccgtactttgttatggtttacgtaccgattttcgaggtgaattatttattggcagccaatacttactggcatggtccgacaaactggttgaattaaaaaccatctgtttttgtggccgtaaagcaagcatggtgctgcgtcttgatcaagcaggcagaccttataacgaaggtgagcaggtggtaattggtggtaatgaacgatacgtttctgtatgccgtaaacactataaagaggcgttacaagtcgacagtttaacggctattcaggaaaggcatcgccacgattaataagaatttctttactgacagggtgagcagggcacttttatcctgtcagttcgttttacgcacttcttccgggctatatacccttctcggcagttttttaacgccgctatacgcctcacagggctcttaagcaccgacgttgacttgtgacctgtaaagtacaatatccctgtgtttaggcgttatacatcgtcgcaaatatgatgaaggctaatgctgtcggtttatggaaaagttgctttgggtaaacaaaaaatacggccccagaagggcaatgccgttcacttaagaggagcggcactatgtttcacaggataacgggtttttgatatcttaaccgacctcggccttgatggtcgggggcgttttgttatgaacaccacttccagagcaccccgaagatgctccagtcgtttcgggatggtccctggtgacgccgtgtttcccagctctatcatttctgatgcgatattcttccacgcaggcagtagccagtggcggttacaacccttctggttcagcgtcagcagcaggtcttcgctgtaaaaaagtttatcaaacaacgtaatagagttatccgggatggtggcgagcatggagtgggccagcacagtttcgctctgccggtaaggtgcggtcacggcattcagcagaatgtgacttcccaggttcattaaggccaccagacgcataaccgggtaggcgttctgccgcttagtggatgtgttggcagacccataatattcacgcagctcgggtttatcaggtgtcctgaactgtgcgccatcaatggcaaaaagttgcaggccgtgccagtcatccttcaggtaacgttccgcgcccctgtctgtgcggtctggcggaagagccattccactggggcggcccccacgcgctgacgcgcctgggtgacagcgctgcgggccagcaggttcatccccgcttcgccatccgcgctcaggttcagacggcgaacaacatcggtaattggctcattgcaccaccatccagataaccatgtcccccggtaaacgacggcggcgaacggtcgcatgagcagaaagcgtcaggcagtgttgtatccactcggtgggaaggtgttctgcaaatagttgtgcagagggcggaggcataagcggatggtcactgaaatcgagcagatcattgagaagtggcataagaaaacggctccctgttgtggaagccgttatagtgcctcagtttaaggatcggtcaactaatccttaactgatcggcattgcccagaaggggccgtttatgttgccagacagcgctactgattaagcggattttttcgcttttttctcagctttagccggagcagcttctttcttcgctgcagtttcaccttctacataatcacgaccgtagtaggtatccagcagaatctgtttcagctcggagatcagcgggtaacgcgggttagcgccggtgcactggtcatcgaatgcatcttcagacagtttatccacgttcgccaggaagtctgcttcctgaacgccagcttcacggatagatttcggaatacccagttcagctttcagcgtttccagccatgccagcagtttctcgatcttagcagcagtacggtcgcccggtgcgctcagacccaagtggtcggcaatttcagcataacgacggcgagcctgcggacggtcatactggctgaatgcagtctgcttggtcgggttgtcgttcgcattgtagcgaataacgttacaaatcagcagggcgtttgccagaccgtgcggaatatggaactgggaacccagtttgtgcgccatactgtgacatacacccaggaaggcgttcgcaaacgcgatacccgcgatagtcgctgcactgtgaacacgttcacgcgctaccggatttttagacccttcgtggtaggacgctggcagatattctttcagcagtttcagtgcctgcagagcctgaccatcagagaactcagatgccagtacagaaacataagcttccatggcgtgagttactgcgtccagaccaccgaaagcacacagggacttcggcatgtccataaccaggttggcgtcgacaatcgccatatccggagtcagcgcatagtctgccagcggatatttctgaccagtagcgtcgtcagttacaaccgcaaacggagtgacttcagaacctgtaccagaagtggtggtgacagcgatcattttcgctttcacgcccattttcgggaacttgtagatacgtttacggatatccataaagcgcagcgccagctcttcgaagtgagtttccggatgttcgtacataacccacatgatcttcgcggcgtccatcggggaaccaccacccagcgcgataatcacgtctggtttgaaggagtttgccagttctgcacctttacgaacgatgctcagggtcgggtccgcttctacttcgaagaagacttcagtttcaacgcctgctgctttcagtacggaagtgatctgatcagcataaccattgttgaacaggaagcggtcagtcacgatgagcgcacgtttgtggccatcagtaatcacttcatccagcgcgattggcagggagccacggcggaagtagatagatttcggaagtttgtgccacaacatgttttcagctcgcttagcaacggttttcttgttgatcaggtgtttcggaccaacgttttcagagatggagttaccaccccaagaaccacaacccagagtcagggaaggtgcgagtttgaagttatacaggtcaccgataccaccctgagacgctggggtgttaatcaggatacgcgccgttttcattttctgaccgaagtaagaaacgcgagccggttggttatcctggtcagtgtacaggcaagaggtatgaccgataccgcccatagcaaccagtttctctgctttttctaccgcgtcttcgaaatctttagcgcggtacattgccagagtcggggacagtttttcatgtgcgaacggttcgctttcatcaacaacggtcacttcaccgatcagaatcttggtgttttctggtacagagaagcctgccagttcagcaattttataggctggctgaccaacgatagccgcgttcagcgcaccgtttttcaggataacatcctgaacagctttcagctctttaccctgcaacagatagccgccgtgggttgcaaaacgttcacgtacagcgtcataaacagagtcaacaacaacaacagactgttcagaagcacagattacgccgttgtcgaaggttttggacatcagtacagatgcaactgcacgtttgatatcagcagtttcatcgataacaactggagtgttgcccgcgcctacaccgatagctggtttaccggagctgtatgcggctttaaccatgcccggaccaccagtcgcgaggatcaggttgatgtctgggtggtgcatcagtgcgttagacagttcaacagaaggttgatcgatccagccgatcagatctttcggagcaccggcagcgatagcagcctgcagaacgatatcagccgctttgttggtggcatcttttgcacgcgggtgcggggagaagataatggcgttacgggtcttcagactgatcaggcttttgaagatagcagtactagtcgggttagtggtcggaacgataccgcaaataataccgattggttcagcgatagtgatggtaccaaaagtgtcgtcttcagacagaacaccacaggttttttcatctttataggcgttgtagatatattcagaagcaaagtggtttttgatcactttatcttcgacgatacccatgccggattcggcaacggccattttcgcgagtgggattcgagcatctgcagcagccagagcggcggcgcggaagattttgtctacttgctcttgagtgaaactggcatattcacgctgggctttttttacacgctctacgagtgcgttaagttcagcgacattagtaacagccataatgctctcctgataatgttaaacttttttagtaaatcatctgctcgaatacgagagtatagtcagtgcggtgatgatttgcttaacctatgaaaatcaaaagcttactcgcgctcacactcactgtgatttactaaaagagtttaaacattagagttattatctctaatgcgtcacttccaggtggcgtaagcaagattactcacttctgggtactgattacgtgatccaaatcaaatttttgcaaagctgacacctttcagcatcgcttttcgccattatagctaacagttaataaattgtagtatgatttggtggctacattagcatgttttgcacaactagataacaataacgaatgatagcaattttaagtagttaggaggtgaaaaatgctgtcaaaaggcgtattgtcagcgcgtcttttcaaccttatttatggctaacattatccggcttttgcttcggagctaaccgtgattcagaccttttttgattttcccgtttacttcaaatttttcatcgggttatttgcgctggtcaacccggtagggattattcccgtctttatcagcatgaccagttatcagacagcggcagcgcgaaacaaaactaaccttacagccaacctgtctgtggccattatcttgtggatcagcctttttctcggcgacacgattctacaactttttggtataagtattgatagcttccgtatcgccgggggtatcctggtggtgacaatagcgatgagcatgatcagcggcaagcttggcgaggataaacagaacaagcaagaaaaaagtgaaaccgcggtacgtgaaagcattggtgtggtgccactggcgttgccgttgatggcggggccaggggcgatcagttctaccatcgtctggggtacgcgttatcacagcattagctatctgtttggtttctttgtggctattgcattgttcgctttatgttgttggggattgttccgcatggcaccgtggctggtacgggttttacgccagaccggcatcaacgtgattacgcgtattatggggctattgctgatggcattggggattgaatttatcgttactggtattaaggggattttccccggcctgcttaattaattcctttcaaatgaaacggagctgccatgctccgtttacttcgtcattatttttactttgttcccgcgcagttatcaaaagcaaaaggaataggtaaaaatattcttctcaaattacagttagttataaggatttccttaactgcttctcctcaccatcatgttattttcgccacatcataatcctgggcttgctgaagaataattgaaatgatattattaattccactgcctttggtagaggaaagtgctaaataataatcaattgttaaattattgtgcatttcactactggaactgtaatcagaaaagatagacatgcttagccaatctctatttgattgaattgaaagatgtttgttaaggcatggatgcaagctatagattctgatacggtcaataaaagagaattgcttaacaattttgcaaaatgtattggcgagtaagaaccgcatttggtactttccgggcaaccgccagacgattctttattggtaatgagaataattaacaattaaagagcgtcgcgaaagaataatgtgtctcgacaggggagacacagtacgaatcgacataaggtgatcgtctgaatcaccagaataaataaagtcggtgatagtaatacgtaacgataaagtaacctgacagcagaaagtctccgagcctgtgcagggtcccaatccgggattacacatgctggttaataccagtaattataatgagggagtccaaaaaacaatgaccaacatcaccaagagaagtttagtagcagctggcgttctggctgcgctaatggcagggaatgtcgcgctggcagctgatgtacccgcaggcgtcacactggcggaaaaacaaacactggtacgtaacaatggtagtgaagttcagagtttagatccgcacaaaattgaaggtgttccggagtctaatatcagccgagacctgtttgaaggcttactggtcagcgatcttgacggtcatccagcacctggcgtcgctgaatcctgggataataaagacgcgaaagtctggaccttccatttgcgtaaagatgcgaaatggtctgatggcacgccagtcacagcacaagactttgtgtatagctggcaacgttctgttgatccgaacactgcttctccgtatgccagttatctgcaatatgggcatatcgccggtattgatgaaattcttgaagggaaaaaaccgattaccgatctcggcgtgaaagctattgatgatcacacattagaagtcaccttaagtgaacccgttccgtacttctataaattacttgttcacccaagtactagtccggtgccaaaagccgctatcgagaaattcggcgaaaaatggacccagcctggtaatatcgtcaccaacggtgcctataccttaaaagattgggtcgtaaacgaacgaatcgttcttgaacgcagcccgacctactggaacaacgcgaaaaccgttattaaccaggtaacctatttgcctattgcttctgaagttaccgatgtcaaccgctaccgtagtggtgaaatcgacatgacgaataacagcatgccgatcgaattgttccagaagctgaaaaaagagatcccggacgaagttcacgttgatccatacctgtgcacttactattacgaaattaacaaccagaaaccgccattcaacgatgtgcgtgtgcgtaccgcactgaaactaggtatggaccgcgatatcattgttaataaagtgaaagcgcagggcaacatgcccgcctatggttacactccaccgtatactgatggcgcaaaattgactcagccagaatggtttggctggagccaggaaaaacgtaacgaagaagcgaaaaaactgctggctgaagcgggttataccgcagacaaaccgttgaccatcaacctgttgtataacacctccgatctgcataaaaagctggcgattgctgcctctagtttgtggaagaaaaacattggtgtaaacgtcaaactggttaaccaggagtggaaaacgttcctcgacacccgtcaccagggtacttttgatgtggcccgtgcaggctggtgtgctgactacaacgaaccaacttccttcctgaacaccatgcttagcaacagcagcatgaataccgcgcattataagagcccggcctttgacagcattatggcggaaacgctgaaagtgactgacgaggcgcagcgcacagctctgtacactaaagcagaacaacagctggataaggatagcgccattgttcctgtttattactacgtgaatgcgcgtctggtgaaaccgtgggttggtggctataccggcaaagatccgctggataatacctatacccggaatatgtacattgtgaagcactaatggcaatacgtggggcaggagtgtcctgctccacggtgtctgatttttatcgcattacagaaggcacaggccagaaggtagggcaatgttaaaatttattctacgtcgctgtctggaagcgattccgatgctatttattcttattactattagcttctttatgatgcgcctcgcgccgggaagcccttttaccggcgaacgtactttaccgccagaagtgatggccaatatcgaagcgaaatatcatcttaatgatccgatcatgacacagtatttcagctacctgaaacaactggcgcacggtgatttcggtccaagctttaaatataaagattatagcgtcaatgacttggttgcatccagttttcccgtttctgccaaactgggagccgcagcatttttccttgcggtaatactgggtgttagtgctggcgttattgccgcattaaaacaaaacaccaaatgggactataccgtgatggggctggcaatgaccggggttgttatccccagttttgtggttgcaccattattagtcatgatatttgcgatcattttgcattggctgccgggcggtggctggaatggtggggcgcttaaattcatgatattgccgatggtggcgttgagtctcgcttatatcgccagtattgcgcgtattacccgtggctctatgattgaagtattacactccaattttattcgtactgcccgggcgaaagggttacctatgcggcggatcattttacgtcacgcattaaaacctgctctgttacccgtgctctcttatatgggccccgcatttgtcggcattattaccggttctatggttatcgaaaccatttatggtttgccggggattggacaactgttcgttaatggcgcattgaaccgtgactattccttagtgttaagcctgaccatcctggttggtgctttaaccattttgtttaatgccattgtcgatgtgctatatgcggttatcgacccgaaaatccgttactgatactggagctcgcgatgatgttaagtaagaaaaacagcgagacgctggaaaatttcagtgaaaagctggaggtcgaagggcgcagcttgtggcaggacgcacgtcgacgttttatgcataaccgtgcggcggttgccagtctgatagtgctggtgctgatcgcgttatttgtaatcctggcaccgatgctttcccagtttgcctatgacgatactgactgggcgatgatgtccagcgccccggatatggagtccggtcactactttggtactgacagttccggtcgcgacctgcttgtgcgcgttgcgattggcgggcgtatcagtctcatggtcggtgttgctgcggcactggtggctgtggtcgtcgggacactttatggtagcctttccggttatctgggcggtaaagtggatagcgtaatgatgcgtctgctggaaatcctcaactccttcccattcatgttcttcgtcattttgctggtgacctttttcggtcaaaacatcctgctgattttcgtggcgataggcatggtttcctggctggatatggctcgtattgtgcgtgggcaaaccctgagtctgaagcgcaaagagtttattgaggcggcacaagttggcggtgtaagcacaagcggcattgttattcgccacattgtgccgaatgtactcggtgtggtggtggtctacgcaagtcttctggtgcccagcatgatcctctttgaatctttccttagcttcctggggttgggtacgcaagagccgttaagcagctggggtgcattgctgagtgatggcgcgaacagcatggaagtctctccatggttattgttgttcccagcgggattcctcgtggtgacgctgttttgtttcaactttatcggcgatggcttgcgtgatgccctcgacccgaaagatcgttaaggagtgcagccatgagcgtaattgaaactgcaactgtgccgctcgcacaacaacaggctgacgcactgctgaacgtgaaagatttgcgtgtcacctttagtaccccggacggcgacgtcacggcggtcaatgatttgaatttttccctacgtgccggagaaacgctgggtattgtaggtgagtctggtagcggtaaaagccaaactgcatttgcgttgatgggcctgttggctgccaacggacgtattggcggaagcgcaaccttcaatgggcgtgaaatcctcaatttgccagagcatgaactcaataaactgcgcgctgaacaaatcagtatgatttttcaggacccaatgactagcttgaatccctatatgcgcgtcggtgagcagttgatggaagtgctgatgctgcataagaacatgagcaaagctgaggcgtttgaagagagcgtgcggatgctcgatgcggtaaaaatgccggaagcgcgtaaacgcatgaaaatgtacccgcacgaattttctggcggcatgcgtcagcgagtcatgattgcgatggccttgttatgtcgacctaagctgctgattgcggatgaaccaacaactgcgctggacgtcaccgtacaggcgcagatcatgacgctattaaatgaactgaagcgggaatttaataccgccatcattatgatcacccacgatcttgtcgtggtggcggggatctgcgacaaagtgctggtaatgtacgccgggcgcacgatggaatatggcaacgcgcgcgatgtcttttatcaacccgttcatccttattctatcggtttgctcaacgcggtgccgcgtctcgatgcggaaggtgaaacaatgttgaccatcccgggtaatccgccaaacctgctgcgattaccgaaaggttgcccgttccagccacgttgtccgcatgcgatggaaatttgtagtagcgcaccgccgctggaagagtttacgcctggccgtctgcgtgcttgctttaaaccggtggaggaactgttatgaatgctgtaactgaaggaagaaaagtcctccttgaaatcgccgatcttaaagtgcactttgaaatcaaagatggcaaacagtggttctggcaaccgccgaaaacgctcaaagccgtcgatggtgtcactcttcgcctgtatgaaggggaaacattaggtgtggtaggggaaagcggatgcggtaagtccacctttgctcgcgccatcatcggtttggtcaaggcgaccgacggtcatgttgcctggttaggtaaagagttgctgggcatgaaacccgatgaatggcgtgccgttcgcagtgatattcagatgattttccaggatccgttggcaagcctaaacccgcgtatgaccatcggcgagatcatcgctgaaccactgcgtacttatcatccgaaaatgagtcgccaggaagttcgcgagcgcgtgaaggcgatgatgctgaaagtcgggttattgcctaacctgattaaccgctatccgcatgagttctctggtgggcagtgccagcgtatcgggattgcgcgtgctcttattcttgaaccgaagctgattatctgtgatgagccggtgagcgcgctggacgtgagtattcaggcacaggtggtcaacctgctccagcaattgcaacgtgagatgggattgagtttaatttttatcgctcatgacctggccgtggtaaaacacatttccgatcgtgtgttggtgatgtatctcggccatgcggtagaactggggacctatgatgaggtctaccacaatccactacatccttacaccagggcattgatgagcgcagtccccatacctgatccggatctggagaagaacaaaaccatccagttactggaaggggaattaccgagcccgatcaacccgccttccggttgtgttttccgtacccgttgcccgattgccggtccagagtgcgccaaaacacgtcctgttctggaggggagtttcagacactccgtttcttgcctgaaagtcgatccgctttaaaaacaataagggctgacagttgtcagccctttttcacgctaaaagcgattatttattcccgccagatgatatggcaaagtttgtgatctttttcgcggcataacagaatgcgggcaaaaacatcgttgatttcaccatcttcactgtccgccagaccaatcaccacttcggcaaaaaagtccgggttcaaatcgaaatcaacatgttcctgccagtcttccgccggatcgaataactccgcgccgccgcgctcttcaaactgaagattgaacagcaggacatcagctggatcgagattgtcggcagccagttcgagaaaaatatcgtaggcctgttcaagcgtttcatcttcagtcaggcgattgtttagatccatatccatagttactacctgtttaacctctgttggcgacgttttacagcaacggactgaagaagtaaaacagtcgctcggcgacacgttgccataatggacgttttagccataaacgggcatcgagcagacgactacggctaatataatcgtcctgaacggcggcgaggtcagcaccaaaacctttatcgtcgattgccagggtaatctcgaaatttagccacagactacgcatatcaaggttaactgtgccaaccagacttagttcgccatcgaccagcacgctcttggtatgcagtaacccgccttcaaactgataaattttaaccccagcagccagcagttccgtaaagaatgcgcgactggcccagccgaccagcatgctgtcattttttcgcggaaggataatactgacatccaccccgcgctgcgccgccgtgcaaatcgcatgaagtaaatcatcgcttggcacaaagtagggcgtggtcatgatcaaatattcacgcgcgctataagccgcagtcaataatgcctggtgaatgagatcttccggaaagccggggccagaagcaattgtgtgaatggtgtgaccgctggcctgttcaaacggcataatattgacatctggtggtggcggcagaatacgttttccggtttcaatctcccagtcgcaggaataaataatccccatcgcggtggcgatagggccttccatacgcgccatcagatcaatccattgccctacgcccgcatcttgtttgaagtagcgaggatcgaccatattcatgctgccggtgtacgcgatgtaattatcgatcatgatcatcttgcgatgttggcgcaggtccatacggcgtaaaaacacacgcatcagattgacctttaaggcttcgaccacttcaataccggcattacgcattagctcgggccacgggctgcggaaaaaagccacactcccggcggagtcgagcatcaatcggcaatgaatgccgcgtcgcgcagccgccattaaactttcagccacctggtccgccatgccgccgggctgccagatataaaacaccatctcaatattatggcgcgcgagctggatgtcgcggattaacgcctgcatcacatcatcactctcggtcatcagttgtagctgattccctttgaccccagcgatcccctgacgacgctcgcaaagcttgaataatggcgcagcgacactgctattttcttcggcgaagatatgcttacaggctttaaggtcgttaagccattttgcggtggaaggccacatcgctctggcgcgctcagcgcggcgtttgcctaaatggagctcgccaacggcaagataggcaataattccgactaacggcagaatgtaaataatcaacagccaggccatcgcggagggaactgcgcgtcgtttcattagaatgcgtaaagttacgcctgcaatgagcaaccagtatcccagaatggccaaccaactcaccaacgtataaacggttgtcatagattagaaatccttttgaaagcgcattgttatgagtttacgcatatggattcatctggcaaataaaaacgcgggaaaagcactggtcagcgtcgggggtgggggtataatgaccattctgttattgcatagagtagttaacatgaagcggagtagaacggaagtggggcgctggcgcatgcagcgtcaggctagccgacgtaaatcgcgttggcttgaggggcaatcgcgccgaaatatgcgtatccacagcatcaggaagtgcattctaaacaaacagcgtaactcgttattgtttgcgatctacaatatctaaatgtactgggcaccattgcggtgcccaataagtttactcttccgtctttaaactttatttttgcgcgctttctttactgtcagctttcgtttctagttcatcgttatcgctgaaaataccatgaccactgttcaacaacatactaacgagcatatcattattaatctcttcaccatttaaaactcgcgccagaatttcgctgccaaacagttgcggactgagaatgatatccggatgtaccatcttaatcttattcaggtttttgctatcactgacggcgagaactgttttgacatcactgctcatatcttttgcgctgagtacaacaaacgcgttatctgcatcgttatcactcagcgccagaatggcccggcaacgatcgattcccgctttctttaatacagaactgtcattactgtcaccggggataacatcagcattatcgcctaagcgttgctcaagttgcttgatatcatcttcaggcaagttgctgataaccgttacgttttgtccgcgttgattcagttgcaggatcgtattgatggcgagaatgctatgtccgcaaacaataaaatgatctttacgatgcattgtatgattgtttccttttacaagtttgttgaatcccccgcggataagcggaccaaaaatactggtcatagatgtggcaaaaacggtaatgccggaaataatgacgctaatagtgaacaatcgtgcactttcagaaacagggacaatatcgccatagccgacggtactcatggtttctatgctaaaatagaacgcggtcatcaaactttctattcgcggattaaaaccttcgcttaaataaagcgcaccgtaggtactgtaaaacagtaatgtcgtgaaactaataaatgcaaaaattgtcccggctgcggcgctactgtgggagaagtctttgcgcagtatcagcaaaaacaccagcgtaaaaatgcaaaatccaatactaaatttcagccagggataaaaatgcagggtgtaaattagcgctatcaacaacaaaatgatactgattgcccatgcgagctttgcccggaacagtaagccaatggagttcaggacaagaaagacgccgagcataaagagtggggcgtttgccagcaaggagagatccaactcactaaatgctttgatatggaaaatatcaagcaaattgacgctcataccatagattgttttaaaaataagcaatccatttaaaaagacggccagcgcgagaatgtcgtgccgaagggtcacccataaatttgttgctgtttgtttgaatgtagcccagtgactcactgatacctctgtaaccacaattttgtttaattatcttagcgtgcacattttctgaacatacatgcagcgcgtgaatgtgttaaacaatagtagatgactttatccgcagtaatcaaaggatttgagcgagcaactgtacctcaggaaaggtcatttttcctgaatatgctcacatcatataaagaaatacagataaagttattatctgcttgtggtggtgaatgcactgaccggctataaggaaaggccaaacaagaacacggttgcaaaaaccgtgcccttaaatattgaatctctattcagaacactttcttaaatggtttcacactaacgtgttcatagactcctgccgctacgtacgggtcagcatcggcccaggcctgagctgcttccaggctttcaaattcagcaataacggtactgccagtaaatcccgcagcccctggatcgttactgtctaccgctggcattggaccagctgtcaacaaacgaccttcatcatgcagtaactgtaaacgtgctaaatgtgccggacgaacggaaaggcgtttttcgaggctatcagctttgtcttgagcgtaaataacatacaacacgggcacaactccttgttcgggaaagttgtaaagtacgttatttgaaagggcgaagatctgcaacggaaagatgatgtctttgttaaggccatgcataaagtaagggtaattacgccaaaaatgacattttcactgatcctgatcgtcttgccttattgaatatgattgctatttgcatttaaaatcgagacctggtttttctactgaaatgattatgacttcaatgacccttgatttacctcgccgcttcccctggccgacgttacttagcgtctgcattcatggtgctgttgtggcgggtctgctctataccagcgtacatcaggttattgaactacctgcgcctgcgcagccgatttctgtcacgatggttacgcctgctgatctcgaaccgccacaagccgttcagccgccaccggagccggtggtagagccagaaccggaacctgagccgatccccgaaccgccaaaagaagcaccggtggtcattgaaaagccgaagccgaaacctaagccaaaaccgaagccggtgaaaaaggtacaggagcagccaaaacgcgatgtcaaacccgtagagagccgtccggcaagtccgtttgaaaatacggcaccggcacgcctgacaagtagtacagcaacggctgcaaccagcaagccggttaccagtgtggctagtggaccacgcgcattaagccgtaatcagccgcagtatccggcacgagcacaggcattgcgcattgaagggcaggttaaagttaaatttgacgttacgccggatggtcgcgtggataacgtacaaatcctcagtgccaagcctgcgaacatgtttgagcgtgaggtgaaaaatgcgatgcgcagatggcgttatgagccgggtaagccaggcagtgggattgtggtgaatatcctgtttaaaattaacggcaccaccgaaattcagtaagcagaaagtcaaaagcctccgaccggaggcttttgactattactcaacaggtaaggcgcgaggttttccttcaggatcaaccgcgacatacttaaataatgcttctgtcgctttatagcgttgcccaattggttcagacgctacttttttcacccacacttcaatattaatgctgacgcttgtcgtccctttctggacacagcgtgcatagcagcacaccacatcgccgaccgcaaccggccgtaagaaagtcattccttcaacccgcacagtcactacgcgaccgtgggcaatttcttttgccagaatagcgccgccaatatccatttgactcattaaccaaccaccaaagatgtcaccattggcattggtatcggcgggcatggctaaagtacgtaaaacaagatcgccctgagggacgttatgtgttgtagacatggtaaaaccgacttaaaaggaaaatcacaggcgcgatgctactatgattttcctgaggagaacagaggagatacagcgccagccccgaaggactggcagtctggttaggatttatcttcctgcggcatgtggcggtagatatagataccgcttaacaatgtgaagattaaggtaagggcggtcaggccaaagactttaaagttgacccaaatattttgcggcagccagaatgcgatgtagatgtttgccagaccgcaaaggataaagaaaacagcccaggccagattcagcttgctccataccggttgcggcagcgtgagttctttacccagcatccgctgaattagcggctttttcatcacccattggctgactaacagggctcccgcaaatagagcataaatgacagtaaccttccatttaataaactcatcattgtggaagaacagcgtcaagccaccgaagacgaccaccagaacaaaagtgatcagggccatcttctcaaccttacgaaagcgaacccagctatagataagcacaatcgccgtggcgacgatcagcgccgcagtagccgcatagatgtcataaatcttgtaaaacgcgaaaaagacaaccagcggtaaaaaatcaagaaactgcttcattttacgattccgtaatcaaatgcttaaggttattggcgaatcaacatatacaggcggaacagatagatgagcaatatggcactaatcaggttgctcaaggtgttcgccagtacggcaccaatttccggggttaatgcggcaaaagaagaggcaaaaagcagcaacagtgtttttgccagcaaccagctcagtactgcgggtgccaccagacgcatattcgcccaagtcagccgcatactgctacgcatgctggcaaaaacgcccattttgtcctgtaccaacatcaccggtgccagggccagtaaaatggccatgataattcccggaacgaccaccagcatgatgccaatctgtactaaaagggtagtcagaaaaatcagaataaataactttggcaatatcggcgcactggcaccaatagctcgcagcgcactgactctctgacccgcagacaccagctggataattaatattacgcctccggcgagaatggcgttaccgattaatccactaaaagtggacgccgcactagcctgcagcaaaatttgttgctgttccggactcatattctgaaccaggtcgaacaacccactactgccgctaacgggcacgccgtcattgagctgcgcaagctgtgcatcactgggactgaaaacatgccctaacaccactgtgataaacgcacatagcaagcttaccaacagaatggtcataaattgattacggaagaaatttccggtgtcacggtatacggactgcgccgtgatagacatgcactctccttgagttttatgcaggtgttaattagcgggcaattgtaccctggttaagcctcgggtggcagcatcaggtcttgtatggaaaagcatatctttgtaaagcggaggtaattgctggccttcaggcatgggcaaatcgcggcaagtggcgaccgagttaatatttgcgtagcgaaaatatttaaaaattgatttaaatcacattaaccaggattctcaatgcaacttctaaattaatccagatcaataaagggtgaattatcatatgtaatgtgatctatgtaggatcatttgttactccaatgtaggtatattcgtcacgtttttataaccataacgacggagcggatatgaaaaagttaacagtggcggctttggcagtaacaactcttctctctggcagtgcctttgcgcatgaagcaggcgaattttttatgcgtgcaggttctgcaaccgtacgtccaacagaaggtgctggtggtacgttaggaagtctgggtggattcagcgtgaccaataacacgcaactgggccttacgtttacttatatggcgaccgacaacattggtgtggaattactggcagcgacgccgttccgccataaaatcggcacccgggcgaccggcgatattgcaaccgttcatcatctgccaccaacactgatggcgcagtggtattttggtgatgccagcagcaaattccgtccttacgttggggcaggtattaactacaccaccttctttgataatggatttaacgatcatggcaaagaggcagggctttccgatctcagtctgaaagattcctggggagctgccgggcaggtgggggttgattatctgattaaccgtgactggttggttaacatgagtgtgtggtacatggatatcgataccaccgccaattataagctgggcggtgcacagcaacacgatagcgtacgcctcgatccgtgggtgtttatgttcagtgcaggatatcgtttttaattccgcacaaaaacgaccccgtaatatacggggtcaataaggacatggtataaagggtattatttcttcgcttctacgccatcagtttcagagcgaattaaaaatttctcagttgtttgcggaatattctgaatcagccagtcggccatttgcttttcctcatttaaaatcgcttcgatggttggaatactagctgtatcaccggcattttttgctgctgctaatagactggtgtaacaggcgatttcaaattgctcgaagacatatccgctaatagagcctttgactatttcatcagaagggaatataccaccgatactctgcccaagcgcagccattttactcatggaatctttaatgacactacgactaatgtcattacgatcaagaatagtttccagttgaacaatctggtttttggtttcactaagatgttgttcaatacgagcgcgtagttcaggataattatctatacggctggccatggattcaagcatagattcggcttgcttttccattgcgtgggcgtcacgtaaccagtcatgataatgttcaatacgattcatgaaaatgtcctctttataaaatgactaaaagttaaaattcatatttcaggctttattttcggctttcttatttacgttattaatggccagatcagtcagtttgatgtcggtggccttttcttcttccagggtttctttcagaagcttcgctgctttacggtaacctaattgttcagccagcgtcgctaatgtcccgtaactggcaatctcataatgctcgactttctgtgctgcggcaatcagtgcggcatcacgcacttcgtttttctcggtactttcgatgacctcattagcttcttcaataagaccttccattgccacacatttcatgcgcttaattttcaggttgctttcggactccacaacttgatcaatacgttcaatctgtccatgagtttcctcgaggtgcgcatgaaaagcctgacttaatttttcattacttgttgctcttgcgagttttgccagtgcccgggttaattgtttttctgcgctgtaggtatcactaagcaggtgaataaatacatcttcaatggtcttcatattcatatttttctccagtgaaatcactgcgagccatacggcccgcagatgcaattatctttatcagctgatattaataattaacggtgaatcaggatttgccacttttattaccaccgctttgttgaccgccttttttacccgcttcagatgcgcgttgcggatcatttttaaaattaccgccgctatgctgaccgcctttacggcctgcgtcggatgccttctcacggtcttcggcgaaatttccactaccaccacgatgttcggccatgttatttctcccgttgcgttgcattgtttcattaatatgagtgttgtgtgtcgacactcattaaaattagtcgctaatgagaattagtcaaattaagcgcaacgagaagatagagggaaaatatattttgaggaacattctggatatattaacaattacctgaggaataagtgacttagagaaaattattgattttactggtgttatgttgcgggattaatttgtttgattatattactgttgggcggaaaaatgacgtaagttgacgttcgaccggggtaagcgaaacggtaaaaagataaatattaaatgaatttaggatttttccggcttcattaaagaaagttaaaatgccgccagcggaactggcggctgtgggattaactgcgcgtcgccgctttcatcggttgtacaaaaactttcagtgccgccagcattttctctggctcattaatatgttgctcgatgattttaacaatggcgctaccagaaatcgcgcccgcagctcctgcatcaatcgctgcttttacctgatccggggcggaaataccaaatccctgcaatggaggtgcagcgttgtactctttcagcttcgcaaccagatgattgaggggtaacgcggcgcggttttctgcgccggtcacgcctgctcgactcagcaaataggtgtaaccacgaccgtaagaggctatctggcgcagcaggtcgtcatcggcatttggcgggcagatgaagataggtgcgacattatgacgcaacgcggcctggcggaagggcgcggactcttcaactggcacatcggcaaccagcacgctatcgacgccgactttttcgcactgggcataaaactcatcaatgcctttgttaaacaccagattggcatacatcaacaggccaatgggaatggtcgggtgtttctggcgaatcagtgccagcatttcaaaacattgtgccggagtcacacctgccgcaaaggcgcgcagagtggcgttttgaatcgtcgggccatccgccagtgggtcggagaaggggatacctaactccagcgcgtcagcaccggcttcaattagcgtatcgataattttcaaactctgctcaatgcccggatcaccgagcgtgacgaaaggaacgaatgcgccttctttgcgctccttcaactgggcaaacagagattcgtagcgttccatcagatttcccctcgtgctttcaaaatatcgtgaacggtgaagatgtctttatcgccgcgaccggaaaggttaaccaccagtagctgctctttatccgggttttcgcgcatcattttcaacgcatgggccagggcgtgggaggattccagcgccgggatgatcccttcgtgcaggcacagcgttttgaaggcttcaagggcttcatcatcggtaatagacacgtaatcagcgcgtccagtgctgttaagatacgcgtgttgtgggccgacagacgggaaatccagtccggcggagatggagtaagattcttcaatctgcccgtcttcggtttgcatcatcggcgctttcataccgaaatagatacccacgcgaccatgttttagcggtgcgccgtgctcgccagtttcgataccgtgaccacctggctccacaccaatcaggccgacgttggtttcattgatgaaatcagcaaacatgccgatggcattgctaccgccgccaacacaggcgataacggcatccggcaggcgaccttctctttccagaatctgcgctttggtttcttcgccaatcatccgctgaaactcacgcacaatggtcggataaggatgcgggccagctgcggtgcccagcatatagtgcgcggtttcgtaactaccggaccagtcgcgcagcgcctcgttacaggcatctttcagcgtcgcggaaccgctatgcaccgggatcacttccgcacccattaagcgcatacgaaaaacgttagggctctggcgttcaacgtctttggcacccatataaatacggcatttcaggccgagcagggcgctggcaagggcgctcgccacgccatgctgaccggcaccggtttcggcgatgatttcggttttacccatccgcttcgccagcaacgcctgccccagcacctggttagttttatgcgcgccgccgtgcagcaaatcttcacgcttgagatacagcgtggtgttcgtcccggctgtaatgttctggcatttggtcagcgcggttggacgcccggcatagtttttcagcaggtcgttgaactgagcctgaaattcaggatctttttgcgcactgacaaaagcttcttccagctggcgcagagcaggcatcaggatttgtggcacgtacatgccgccaaactcaccaaaataggggttaagtaatgttgtcattgttcctttccttaatatgcgcgcagcgtctggaaaacgctggccaaaagacgtgcgtctttgatgcccggttggctctctacagcagaattaaaatcaagtccggcgcagccggtttgtgccgcttccacgcagttatctgcgcctaagccccccgccagcagaacgttgccaaggctttgaccatttaatagactccagtcaaaacgttgcccgcttccaccctggccgttgtctaaaacatatttatcaacgtgctgaaactcgcgggcgggcagggtttcaccgacgcttaatgctttccagatggcaacatgtgctggcagagcttcacgcagcgtatcgatatacagctgttcttcattaccatgcagttgcactgccgccaggcttaacaccttagctttgtccaccacatcggcaatatcgtgattgcggaacacgccaacatactgcaacggtgccgcagccatcacttcctgcgcctgttcaacgttgacgcaacgcggacttgtcgcaacaaaaatcaacccaccgtaaatcgcgcccgcgtcataagctgctttagcatcttgcccacgcgtcaggccacatactttattctcacccagcaacacccggcgcacggcggcgtgcaaatcgtcatgggccatcaacgcgctaccaatcagaaaaccgttagcgaagtggcttaactcgcgcacctgagcgtaagtattgatgccggattcgctgattaccgtcacgttgtgccccagtttcggcgcaagctcgcgggtacggttgagatcaatgctcaaatcacgcagatcgcggttgttgatgccaacgacctttgctcccaatgcaatggcgcgctcctgttcctcttcattactgacttcggtcagcacccccatctccagactgtgagcgacggcggcaagctggcgatattggtcgtcatccagtacactaagcattaataagcaggcatcggcctggtaatagcgcgccagatagatctggtaagggtcgataatgaagtctttacataaaatcggctgcggggcgatttggctgacgatggggaggaaattaaagctcccctgaaaatatttctcatcagtcagcacgctaattgcgctagcgtaatgtttataaatggcggcaatgcgtgctggatcgaaatcatcacggatcacgcctttactcgggctcgctttcttgcactccagaataaacgccgtgcgcgcaccctgtagcgcatcataaaaatgtcgcgtgctcggctgaacctcattctgaaaactggccagcggttgctgctgtttgcgggcttctacccaaatcgccttgtctgcgacgattttcgctaaaacggtttgcatcatttaccctcgtgccgccagtgcggtgactctgtcgtaagcggaaccactgcgcagtacctcaagaacggtttgcgcattggcttgcagatcttcatggccatgcaggcgcattaacatggcgacgttcgcagcgacggctgcttcatgggcggcgtcgcctttaccttgtaacaaacgtgttaaaatgtcacggttttcttccggtgttccgcctgccagttgctcctggtggtagggtgtcaggccaaagtcttctgcggtgagctgatagcttttaatttcgccgtcatgcagttcggcaacgattgtcggcgcgtgtaaactaacttcatccatcccgccgctgtgcaccaccgccgcgcgttgataccccagcacgcgcaaggtttcggcaatcggcagcaccagttccggactataaacaccaattaacgccagcggcggatgcgccgggttaatcaatggccccagcacattgaacagggtgcgggttttcagttgctggcgaaccggcatcgcgtggcggaatccggtgtgatacttcggcgcaaagaggaaacatacacctaactcatccagcgcctggcggcttttatcggcgttcatatcaagattaataccgaacgccgccagcagatcggagctaccagatttactggagacgctacggttgccgtgtttcgccactttcagcccacaggccgcggcgacaaacgcactggcggtagaaatattgatactgttgctgccgtcaccgccagtaccgacgatatcagcaaacagataatccgggcgcgggaacggcgctgcgttttccagtagcgcggttgctgccccggcgatctcgttcgggtgctcaccgcgaattttcatgctcaccagcgccgccgccagttgttccggcttcagctcgccacgcaccaccgcactaaacagctggtggctttcttgttggctaagcgtctgcgcctgatacagtttttccagaatcggttgcagcgtgttggctggctctagtttctgctgcgcccaggccagcgtttgttccagcaggcgagcgccctgggtggtgagaatggattccggatggaactggaatccacaaacgcgatccgcatcgtgacgtactgccatcaccatgccattaaaatgggcgttgatggttaaaccggccggaatgttactgccaaccaggctgtgataacgcgccaccggcagcgggtttgttaatccggcaaacatcgcctgaccgtcatgttcaatgctggaggctttaccgtggagaatttcgcccgcctgaccgacatagcccccgtaagcttcgacaatcgcctgatgtccgaggcaaatgccaataatgggcagcttgccacgcaagcgggtgaggagttccggcatacaaccggcttcgctcggcacaccggggccaggagaaagcatcagcaccggattgctcatggtcgccaggcgttcaattaaggtttgcgccggaatatggttgcggtaaatcaccacgttatgcccattgctgcgcaactgatctgccaggttgtacgtaaaagagtcgatattatcgagcagcagaatgtcagccatcagaaagtctcctgtgcatgatgcgcggtggcaatagcgcgcagtacagcgcgggctttgttacgggtttcgtcggcttcgctctgcggaacagaatcaaggactacaccagcacccgcttgcacggtggcgataccgttttccaccagcgcgctgcggatcacaatgcaggtgtcgagatcgccatgcgcggtgaaataacctaccgcgccgccgtagctgccgcggcgacgaccttccgcctcggcaattaactgcatagcgcgtactttcggcgcaccgcttaacgtccccatattcatacaggcgcgataagcgtgcagggcgtcaagatcgtgacgcagttcgccgactacgcgagagacgaggtgcatcacataggaataacggtcaactttggtgagatcggcgacgtagcggctgccgggggtgcaaatgcgtgccagatcattacgggcgagatcaaccagcatcagatgttcagacagctctttatgatcggtacgcatttccagttcaatacggctgtcgagatctctgtccagactaccatcggcgcgacgaccgcgtgggcgtgttccggcaatcgggtagatctcaatctggcggctggtggcatcatacttgaggctgctttccgggctcgcgccaaatagggtgaaatcattatcctgcataaaaaacatgtacgggctgggattactctttttcagcacgtaataggccgccagcggactcgggcagggcagagagaaacggcgagatggcaccacctggaaaatttctccagcgcgaatcgctttttgcaacaaacgcactacgccaccgaactcttcatcgctctgattacattcacaacgcatatgcggcacggaaaccactggcagcggcggcgcggcttcggtcagttgctgacgtagttcgttcaggcgagcagtgagacgttgtttttcttcttcattcggagcaaacaggctggcctgaatacgggtgctttttttctgatggtcaatcaccatcagcgtttcagcgagataaaaacagaaatcagggcagttattttccgcactcagttgcggtaaatcttcaaatcccgccacaaggtcataagagaacaggccgccgaagaacatggcttctcgttcttccttcggtacattcaacagattctgcaataaacggaaagcgtcaaaaacgctaagggagcataagcgggcgtcttcatccagcagtggactgacaggggggaagcgcagcacacggcagtttggactttgttcactttccacacccgcaggcagggcgttatccagtagtgccaggagggcttcgccgttgccggaaagtgcctggattgtgacagtgtcacctaaagctgtaatgcgcagcgcactgtctaccagcagcaggctttttaaatcatctttgctgtcgatatctgcggattccagcagcagcgttgccggacgatccccacacaactggtgaaaaagcgcggtgggattgtcgcgataagcgccttcgcaggttagcagttcgagagtcggtttttgtgtttgcattgttattctctaattttgttcaaaaaaaagcccgctcattaggcgggctgggtatctgattgctttacgcatggtgaatacactgcccgtttcaggaagtgcgccaccaacctttcagtacgaaaattgctttcattgtcgataccctttttacgtgaacttgcgtactagttaactagttcgatgattaattgtcaacagctcatttcagaatatttgccagaaccgttatgatgtcggcgcaaaaaacattatccagaacgggagtgcgccttgagcgacacgaattatgcagtgatttacgacctgcacagccataccacagcttccgatggctgcctgacgccagaagcattggtgcaccgtgcagtcgagatgcgcgtcggcaccctggcgatcaccgaccatgacaccacagctgcaatcgcgccagcaagagaggaaattagtcgtagcggactggcgttgaatcttattcccggcgtggaaatttccacggtctgggaaaatcatgaaattcatattgtcgggctgaatattgatattactcatccgctaatgtgtgagttcctcgcgcagcagacagaacggcgcaatcagcgggcgcagctgattgccgaaagacttgaaaaagcgcaaatacctggggcgctggaaggcgcacaacgactggcgcagggcggcgcagtgacgcgcggtcattttgcgcgtttccttgttgagtgcggcaaagccagtagtatggcggatgtctttaaaaagtatctggcgcgcgggaaaaccggatacgttccgccacagtggtgtacaatagaacaagctattgatgtcattcatcattctggcggtaaggcggtgctagctcatcctgggcggtacaatcttagtgctaaatggctgaaaagattggttgcgcattttgccgaacaccacggtgacgcgatggaagtcgcgcagtgccagcaaagccccaatgaacgtacccagctggcggcccttgcgcgtcagcatcatttatgggcaagtcaaggatctgattttcatcagccatgcccgtggatcgaactgggtcgtaaactctggctgcccgcaggcgttgaaggcgtctggcagctatgggaacagccgcagaacaccacagagagggaattatgagccagtttttttatattcatcctgataacccacagcaacgtctgatcaaccaggcggtggagatcgtgcgtaaaggcggggtgattgtttatccaactgattccggctatgcgctcggctgtaaaattgaagataaaaacgcgatggagcgtatttgtcgtattcgccagctgccggacggtcacaactttaccctgatgtgtcgcgatctttctgaactcagcacctatagttttgttgataacgttgcgtttcgtttaatgaaaaacaacacgccgggcaactataccttcatcctgaaggggacgaaggaagtgccacgccgtctgttgcaggaaaaacgcaaaaccatcggtatgcgtgtgccttctaaccctatcgctcaggcgttacttgaagcattgggcgaaccgatgctttccactagcctaatgctgccaggcagcgaatttaccgaaagcgacccggaagaaattaaagatcgtctggaaaaacaggtagatttgattattcacggcggctatctcgggcagaaaccgacaacggttattgatcttaccgatgatacgccggtcgtggtgcgtgaaggcgtaggtgatgtgaagcctttcttataacaaattgcgttccacggatggaagactatggcagggaagtttcgctgcattttgctgttgatagcagggctgtttgtaagttctctaagttatgcagaaaacacggagatcccttcttatgaagaagggatcagcctctttgatgttgaagccactctgcaaccagatggggtgctcgacatcaaagaaaatattcattttcaggcgcgaaatcagcagattaagcacggcttttatcgtgatttaccacgactatggatgcagcctgatggggacgctgcactgctgaactatcatattgttggcgtcacccgtgatggtattcctgaaccctggcatcttgactggcatatcgggttaatgagtattgtcgtgggcgataaacaacgtttcttgcctcaaggcgactatcattatcaaattcattatcaggttaaaaatgctttcctgcgtgagggggattctgatctgctaatctggaacgtgaccggtaaccactggccgtttgaaatttataagacccgtttttctctccagttctctaatattgcgggtaatccatttagcgaaatcgatctttttaccggagaagagggcgacacatatcgtaatggccgcatccttgaggacggaagaattgaatcccgcgatccgttttatcgtgaagatttcacggtcctctaccgctggcctcacgctttacttagcaatgccagcgctccgcaaacgacgaatattttcagccatcttcttttaccctccacgagtagcttgttaatttggtttccgtgtctgttcctggtttgtggatggttatatctctggaagcgcaggccgcaatttacgccggtagatgtgattgaaaccgatgtcattccgccagattacacgcccggcatgttacgtctcgatgcgaagctagtttacgacgataaaggtttttgtgccgatatcgtaaatctgattgtgaaaggaaaaattcatctggaagatcagtctgacaagaaccagcaaatcctgattcgtgttaatgaaggcgcgaccagaaataatgcggtattactgcccgcagagcagttattactggaagcgttatttcgtaaaggcgataaggtcgttcttacggggagacgcaacagagtcttacgcagggcatttttacggatgcagaaattttatctgccgcgtaaaaagtctagcttttaccggtctgatacttttttgcaatggggtggactggcaatattggcggtcattctttacggtaacttgagtcctgtaggctgggcaggaatgagtctggtgggcgatatgtttattatgatctgctggattattccttttttattttgttcccttgagcttttgtttgcccgcgatgatgacaagccttgcgttaatcgtgtaatcatcactttgtttttaccactgatttgtagtggcgtggccttctattctctctacatcaatgtcggagatgtattcttttactggtatatgccagcgggttattttaccgctgtttgcctgaccggttatctcactggcatggggtatatttttctgccaaagtttacccaaactggacagcaacgttatgcccacggtgaagctatcgttaactatcttgcgcgtaaagaggcagcaacacacagtggacgtcggcggaaaggggaaacacggaaactggattacgcgttgctaggttgggctataagcgcaaatttggggagggaatgggcgttacgcattgcccctagcctttctagcgcgattcgcgctccagagattgcccgtaacggcgttttattcagtttacagacgcacctaagttgcggggccaataccagtttgttggggcgaagttattccggtggtggtgctggcggcggcgcgggtggcggaggcggtggtggctggtaattaagctgatgttaatcgaaacaagctttaaccataaagatagtgtagtatgttgcgcctcaaagccaggccgataaacgtcgagtcgtttacttaaggcctgaagagttcaaacagactttactatcagtgagtcagatgtaagttctgactcactgttgcacaaaagcatatcagacgcctgggaaggcgacaccaaaaggaagctctatgagcgaaaagctacagaaagtgctggcgcgtgccggccacggttctcgccgtgaaatcgaatctattattgaagccggtcgtgtgagtgttgatggcaaaattgctaaactcggcgatcgtgttgaagttacccctggattgaaaatccgtatcgatggtcacctgattagcgtacgtgagtccgctgaacaaatttgtcgcgttctggcctattacaaaccggaaggtgagttgtgtacccgtaacgatccggaaggacgtccaacggtgtttgaccgtctgccaaaactgcgtggcgcacgctggattgccgtgggtcgcttggacgttaatacctgtggtctgctgctgttcaccaccgatggtgaactggcaaaccgtttaatgcacccaagccgtgaagttgaacgtgaatatgccgtgcgtgtatttggtcaggttgacgacgcgaaactgcgtgatttgagtcgtggcgtgcagttggaagatggtccggcagcttttaaaaccatcaagttcagcggcggcgaagggatcaaccagtggtacaacgtgactctgaccgaaggccgtaaccgtgaagttcgtcgtctgtgggaagcggttggtgtgcaggtgagccgcctgatccgtgttcgttacggtgatatcccactgccaaaaggtctgccacgcggtggctggacggagctggacctcgcccagactaactatctgcgcgaactggtggagctaccgccagaaaccagctctaaagtcgctgtagaaaaagaccgtcgtcgcatgaaggcgaatcagattcgtcgtgcggtgaaacgtcacagtcaggtgagcggcggtcgtcgttctggcggacgtaataataacggttaatcaaagtatgccggacgtcatatccggcatttttacagattaataatcgatccctatctgcgcttttacaccggcatcaaacgcatgtttgacggggcgtaattcacttaccgtatctgccagttcaagaatatcccgatgacaaccacgacccgtgataatcaccgtctgttgatgtggacgttcatttaacgcctgcaccacttcttccagtggcaaatagtcatacgccaccatatacgtcagttcatcaagcaaaaccatatccagactggaatcagcaagcatccgctttgcatgttgccagacttcgcggcaggcggcggtatcagactcgcggttttgtgtatcccaggtaaagcccgttgccatcacctgaaactcaacgccatgtggctccagcagattgcgttcgccattaggccaggtgcctttaataaactgcacgacgcctactttttttccgtgaccaactgcgcgtgttgccgtaccaaatgccgcggtggttttgccttttccattgccggtaaagacgatgataataccgcgttcatcctgggcctgggccacacgagcatctactttttctttcactcgctgctgacgctgttggtagcgttcatcactcattgggaaattcctggtttacggcccggttgggcgtcaaaggtcatgccggttttacggcggctgtcatcgcccatcagccagaggtagagcggcatgatatcagcgggtgttttaagtttctgtggatcttcggtcgggaaggcgctggcacgcattgcggtgcgcgtaccgcctgggttaatgcagttgacacgcaggcgctgctgatattcatcggccagtacctgcatcatcccttcggtggcaaatttgctcgctgcatatgcaccccagttggctcgtccctgacgtccaacgctactactagtaaagaccagactaccggcgtcgcttttgagtaataaaggaagcagtgcctgggtgagcataaaggtggcattaacgttgacctgcatgacgtcctgccagacctgcggattttgttcgctcattgggcaaacatcgccgagcaatccggcattatgcaaaacaccatccagacgcggataattaacggcaatgcgctgtgccagttgttggcaattttcggacgtgcaggtcagcaaatcgagaataaaccactgtggctgacgcccagtttcttcgtttatgtggctggctacctgacgtaatttttcttcattacggcccaacagaatcactgtcgcaccatagcgtgcatacgtcatcgcggcttcacgaccaataccatcgctggctcccgtcaccaggataatgcgatcattgagtaaatcttgttttggctggtaatgcatggctactcctcaacgacgttgtctgtcgcgctgccagtgtactttatgactttggggctttatgcctgaaacagaagggcatttcaatcagcctggggcgataacaccgcaaaatggatactttgtcatactttcgctgcaataacatctctgcgagacggcttaacatgcctgttgtaaactgtgagccaaagcgttgtttaaccaaggtggggactcgtggaattgttgtctgaatatggtttgtttttggcgaaaatcgttaccgttgtgctagcgattgcggcgattgccgccattattgtcaatgttgctcaacgtaataaacgccagcgtggcgagttacgggtcaacaatctcagcgaacagtataaggagatgaaagaagaactggccgcggcgctgatggacagtcatcagcaaaaacagtggcacaaagcgcagaagaaaaagcataagcaagaagcgaaagcagcaaaagcgaaagccaaactgggcgaggtggcaactgacagtaaaccccgcgtctgggtgctggattttaaaggcagcatggacgcccatgaagtgaacagcctacgtgaagagataacggctgtactcgcagcattcaaaccgcaggatcaggttgtgctccgtctggaaagccctggtggcatggtgcatggttacgggctggcggctagccaactgcagcgtctgcgcgataaaaacattcctttaactgttacggtagacaaagtcgctgccagcggcggttacatgatggcctgtgtggcggacaaaattgtttccgcaccgtttgctattgtgggttccattggcgtggtggcgcaaatgcccaactttaaccgcttcctgaaaagcaaagatattgatatcgaactgcacactgccgggcagtataagcgcacgctgacgttgctgggtgaaaataccgaagaagggcgggagaaattccgcgaagagttgaacgaaacgcatcagttgtttaaagattttgtgaagcgtatgcgtccttctctggatattgaacaggtggcaacgggtgaacactggtacggacaacaggcggtagagaaaggcctggttgatgaaatcaacaccagtgatgaagttattcttagcctgatggaaggccgtgaagtggtcaatgtacgctatatgcagcgtaaacgactcattgaccgattcaccggcagcgcggcagagagcgccgatcgattgttgctacgctggtggcagcggggtcaaaagccattgatgtaaaagacaaacgcgaggctaagacctcgcgttttgctttaatcaaccagatgatatttttcactaagcacatgggccaggtgtttgaacatattaaacaccgcggtgcttttggctgttggcaatccttgttcatctaaaaagtagtcgccggtaaataccagcacgccattacgctgcgtgacgccggtggcttcaatccctgcgagcgtatcctcatgctcacgaatgattttgttggcctctttcaacagcgtttcgcggtcgatgggttgtgtctctttgttcattatttactccttaaacaaggacattagtctacgccaggcatggcttgcagacaaatataccacgctggtggcaagagcgccttactggcaactttggattttgcatgctaataaagttgcgtatcggattttatcaggtacagtgtgacgctttcgtcaatctggcaatagatttgcttgacattcgaccaaaattccgtcgtgctatagcgcctgtaggccaagacctgttaactcagtcacctgaattttcgtgaacagagtcacgacaaggggttgatatccgcagagagcgagtccatatcggtaactcgttgccagtggaaggtttatcaacgtgcgacgcattcctggaagaatcaaattaggtaaggtgaatatgggtaaagctcttgtcatcgttgagtccccggcaaaagccaaaacgatcaacaagtatctgggtagtgactacgtggtgaaatccagcgtcggtcacatccgcgatttgccgaccagtggcagtgctgccaaaaagagtgccgactctacctccaccaagacggctaaaaagcctaaaaaggatgaacgtggcgctctcgtcaaccgtatgggggttgacccgtggcacaattgggaggcgcactatgaagtgttgcctggtaaagagaaggtcgtctctgaactgaaacaactggctgaaaaagccgaccacatctatctcgcaaccgaccttgaccgcgaaggggaagccattgcatggcacctgcgggaagtgattgggggtgatgatgcgcgctatagccgagtggtgtttaacgaaattactaaaaacgcgatccgccaggcatttaacaaaccgggtgagctgaatattgatcgtgttaatgcccagcaggcgcgtcgctttatggaccgcgtggtggggtatatggttagcccgctgctatggaaaaagatcgctcgtggcctgtctgccggtcgtgtgcagagcgtggcggttcgcctggtggtcgagcgtgagcgtgaaattaaagcgttcgtgccggaagagttctgggaagtcgatgccagcacgaccacgccatctggtgaagcgttggcgttacaggtgactcatcagaacgacaaaccgttccgtccggtcaacaaagaacaaactcaggctgcggtaagtctgctggaaaaagcgcgctacagcgtgctggaacgtgaagacaaaccgacaaccagtaaacctggcgctccttttattacctctacgctgcaacaagctgccagcacccgtcttggatttggcgtgaaaaaaaccatgatgatggcgcagcgtttgtatgaagcaggctatatcacttacatgcgtaccgactccactaacctgagtcaggacgcggtaaatatggttcgcggttatatcagcgataattttggtaagaaatatctgccggaaagtccgaatcagtacgccagcaaagaaaacagtcaggaagcgcacgaagcgattcgtccttctgacgtcaatgtgatggcggaaagcctgaaggatatggaagcagatgcgcagaaactgtaccagttaatctggcgtcagttcgttgcctgccagatgaccccagcgaaatatgactccacgacgctgaccgttggtgcgggcgatttccgcctgaaagcacgcggtcgtattttgcgttttgatggctggacaaaagtgatgcctgcgttgcgtaaaggcgatgaagatcgcatcttaccagcagttaataaaggcgatgctctgacgctcgttgaacttacaccagcccagcactttaccaagccgccagcccgtttcagtgaagcaagcctggttgaagagctggaaaaacgcggtatcggtcgtccgtctacctatgcgagcatcattagcaccattcaggatcgtggctacgtgcgagtagaaaatcgtcgtttctatgcggaaaaaatgggcgaaatcgtcaccgatcgccttgaagaaaatttccgcgagttaatgaactacgactttaccgcgcagatggaaaacagcctcgaccaggtggcaaatcacgaagcagagtggaaagctgtactggatcacttcttcagcgatttcacccagcagttagataaagctgaaaaagatccggaagagggtggtatgcgcccgaaccagatggttctgaccagcattgactgcccgacttgtggtcgcaaaatggggattcgcacagcgagcaccggggtattccttggctgttctggctatgcgctgccgccgaaagagcgttgcaaaaccaccattaacctggtgccggaaaacgaagtgctgaacgtgctggaaggcgaagatgctgaaaccaacgcgctgcgcgcaaaacgtcgttgcccgaaatgcggcacggcgatggacagctatctcatcgatccgaaacgtaagttgcatgtctgtggtaataacccaacctgcgacggttacgagatcgaagagggcgaattccgcattaaaggttatgacggcccgatcgttgagtgtgaaaaatgtggctctgaaatgcacctgaaaatggggcgtttcggtaaatacatggcctgcaccaacgaagagtgtaaaaacacacgtaagattttacgtaacggcgaagtggcaccaccgaaagaagatccggtgccattacctgagctgccgtgcgaaaaaagtgatgcttatttcgtgctgcgtgacggtgctgccggtgtgttcctggctgccaacactttcccgaaaagccgtgaaacgcgtgcgccactggtggaagagctttatcgcttccgcgaccgtctgccggaaaaactgcgttatctggccgatgcgccacagcaggatccggaaggtaataagaccatggttcgctttagccgtaaaaccaaacagcaatatgtctctagcgaaaaagacggaaaggcgactggctggagtgcattttatgttgatggcaaatgggttgaaggaaaaaaataacctttaattctgtcaggtttttataaacaaagggtcgcgaaagcggcccttttttattgcatattattttttcttcacacctatacactaaggctataaatgatatagtggttatagttagcaccttttttattattaaatcgtattagtcacccgccaggtgtgacgaaaaaacgatgttctgatggcgtctaagtggatggtttaacatgaaattacaacaacttcgctatattgttgaggtggtcaatcataacctgaatgtcagtagtacagcggaaggactttacacaagtcaacccgggatcagtaaacaagtcagaatgctggaagacgagctaggcattcaaattttttcccgaagcggcaagcacctgacgcaggtaacgccagcagggcaagaaataattcgtatcgctcgcgaagtcctgagcaaagtcgatgccataaaaagcgttgccggagagcacacctggccggataaaggtagtctgtatatcgccaccacgcatacccaggcacgctacgcattaccaaacgtcatcaaaggctttattgagcgttatcctcgcgtttctttgcatatgcaccagggcagcccgacacaaattgctgatgccgtctctaaaggcaatgctgatttcgctatcgccacagaagcgctgcatctgtatgaagatttagtgatgttaccgtgctaccactggaatcgggctattgtagtcactccggatcacccgctggcaggcaaaaaagccattaccattgaagaactggcgcaatatccgttggtgacatataccttcggctttaccggacgtagtgaactggatactgcctttaatcgcgcagggttaacgccgcgtatcgttttcacggcaacggatgctgacgtcattaaaacttacgtccggttagggctgggggtaggggtcattgccagcatggcggtggatccggtcgccgatcccgaccttgtgcgtgttgatgctcacgatatcttcagccacagtacaaccaaaattggttttcgccgtagtactttcttgcgcagttatatgtatgatttcattcagcgttttgcaccgcatttaacgcgtgatgtcgttgatgcggctgtcgcattgcgctctaatgaagaaattgaggtcatgtttaaagatataaaactgccggaaaaataatttcttgcgttattttcggcaccttttatgtagcgaaggtgccggaatatattctcttttgttacttatttctataccgtgcacaatatttttatccctcatatttatagggtaaattacctgtaaagtagtgtctaattacccgcctcgcaaactccagttttcaaatatctatttcaggtcaaaagattgaattattcactggagacgattcgtaaattcgctggatttttgactaaagtttctttaggatttgtctcatcgtatgattaattacaccaatcgttcaacgtcttgctgataagtgatggcgattatatgaggttagcaatgccttctggaaatcaggaaccccgccgcgatcctgaattaaaacgtaaagcctggctggcggtttttcttggttctgcacttttctgggtggttgtcgcactgctgatttggaaagtgtggggataactatggtcggtcaggagcaactggagtcgtcaccattatgccagcatagtgacaatgaaacagaaacgaaacgggaatgttccgtcgttattccagacgactggcaactaacatcgcagcagcaagcctttatagaactgtttgctgaagatgatcagccgaaacaataattatcatcattcttattacccatttttaatgaattaaagggcttttaatacaccgcagcaataacagcttgagttatctcaacacaaaataataaccgttaagggtgtagcctatgatcaacacaaatatgaaatattggtcctggatgggcgcgttttctctgtcgatgctcttctgggccgaactcctctggatcattactcactgatccttgaccccgctgcggcggggttgtcatttgctttgccacaaggtttctcctcttttatcaatttgggttgttatcaaatcgttacgcgatgtttgtgttatctttaatattcaccctgaagagaatcagggcttcgcaaccctgtcattaaggaggagctatgagcagtaccctacgagaagccagtaaggacacgttgcaggccaaagataaaacttaccactactacagcctgccgcttgctgctaaaagtctgggcgatatcacccgtctacccaagagtctcaaagttttgctcgaaaacctgctgcgctggcaggatggtaacagcgttaccgaagaggatatccacgcgctggcaggatggctgaaaaatgcccatgctgaccgtgaaattgcctaccgcccggcaagggtgctgatgcaggactttaccggcgtacctgccgttgttgatctggcggcaatgcgcgaagcggttaaacgcctcggcggcgatactgcaaaggttaacccgctcagtccggtcgacctggtcattgaccacagcgtgaccgtcgatcgttttggtgatgatgaggcatttgaagaaaacgtacgcctggaaatggagcgcaaccacgaacgttatgtgttcctgaaatggggaaagcaagcgttcagtcggtttagcgtcgtgccgccaggcacaggcatttgccatcaggttaacctcgaatatctcggcaaagcagtgtggagtgaattgcaggacggtgaatggattgcttatccggatacactcgttggtactgacagccacaccaccatgatcaacggccttggcgtgctggggtggggcgttggtgggatcgaagcagaagccgcaatgttaggccagccggtttccatgcttatcccggatgtagtgggcttcaaacttaccggaaaattacgtgaaggtattaccgccacagacctggttctcactgttacccaaatgctgcgcaaacatggcgtggtggggaaattcgtcgaattttatggtgatggtctggatagtctaccgttggcggatcgcgccaccattgccaatatgagcccagaatatggtgccacctgtggcttcttcccaatcgatgctgtaaccctcgattacatgcgtttaagcgggcgcagcgaagatcaggtcgagttggtcgaaaaatatgccaaagcgcagggcatgtggcgtaacccgggcgatgaaccaatttttaccagtacgttagaactggatatgaatgacgttgaagcgagcctggcagggcctaaacgcccacaggatcgcgttgcactgcccgatgtaccaaaagcatttgccgccagtaacgaactggaagtgaatgccacgcataaagatcgccagccggtcgattatgttatgaacggacatcagtatcagttacctgatggcgctgtggtcattgctgcgataaccagctgcaccaacacctctaacccaagtgtgctgatggccgcaggcttgctggcgaaaaaagccgtaactctgggcctcaagcggcaaccatgggtcaaagcgagcctggcaccgggtagcaaagtcgtttctgattatctggcaaaagcgaaactgacaccgtatctcgacgaactggggtttaaccttgtgggatacggttgtaccacctgtattggtaactctgggccgctgcccgatcctatcgaaacggcaatcaaaaaaagcgatttaaccgtcggtgcggtgctgtccggcaaccgtaactttgaaggccgtatccatccgctggttaaaactaactggctggccagcccgccgctggtggttgcctatgcgctggcgggaaatatgaatatcaacctggcttctgagcctatcggccatgatcgcaaaggcgatccggtttatctgaaagatatctggccaagcgcacaagaaattgcccgtgcggtagaacaagtctccacagaaatgttccgcaaagagtacgcagaagtttttgaaggcacagcagagtggaagggaattaacgtcacacgatccgatacctacggttggcaggaggacagtacctatattcgcttaagccctttctttgatgaaatgcaggcaacaccagcaccagtggaagatattcacggtgcgcggatcctcgcaatgctgggggatagtgtcaccactgaccatatctctccggcgggcagtattaagcccgacagcccagcgggtcgatatctacaaggtcggggtgttgagcgaaaagactttaactcctacggtagccggcgtggtaaccatgaagtgatgatgcgcggcaccttcgccaatattcgcatccgtaatgaaatggtgcctggcgttgaagggggggtgacgcggcatttacctgacagcgacgtagtctctatttatgatgctgcgatgcgctataagcaggagcaaacgccgctggcggtgattgccgggaaagagtatggaagtggctccagtcgtgactgggcggcaaaaggtccgcgtctgcttggtattcgtgtggtgattgccgaaagctttgaacgaattcaccgtagcaatttaattggcatgggcatcctgccgctggaatttccgcaaggcgtaacgcgtaaaacgttagggctaaccggggaagagaagattgatattggcgatctgcaaaacctacaacccggcgcgacggttccggtgacgcttacgcgcgcggatggtagccaggaagtcgtaccctgccgttgtcgtatcgacaccgcgacggagttgacctactaccagaacgacggcattttgcattatgtcattcgtaatatgttgaagtaacaactatttgcttgccggttattttgcttccggcaagcaaatgaattacacaatgcaagagggttatttgttcagcaaatggcccattttctcggctttggtatcgagataatgttcgttattggggttacgacctacaatcaatggtacgcgttcaacaatattaatccctgcttcggtcagaatttcgacttttttcgggttattggttaacaagcggacttcattgacgccaaggagtttgaacatatcagcgcaaagagtgaagtcgcgctcatcagcggcgaagcctaactggtggttagcctctacggtatcgtaaccttgatcctgcagtgcgtaagcgcggattttattcagcagaccaatgttacgaccttcctgacggtgatacagcaaaataccacggccttcctcggcaatttgcgtcaatgccgcttcgagctggaagccacaatcgcagcgcaagctgaacagggcgtcaccggtcagacattcggaatggacgcgcgcaagtaccggggtatgcccggaaatatcgccatagactagcgcgacatgatcgtgtccggttgccagttcttcaaatcccaccatcaggaaatcgccccatggggttggcagtttggcttctgccacacgtttaagctgcatgaaattctccagataatgctggttctgtattggcttattttgccataacgagaaggggttcacctaatcacgacgcgtcgatcgttcacggaatggcacaaatctgtcaatttttcctggaactggcgttttcagttatgattgtgggacttatcaaaaaggagaggccatgcgtagcattgccagacgtaccgcagtgggagctgcactattgcttgtcatgccagtagccgtatggatttctggctggcgttggcaacctggagaacaaagttggctactaaaagcggctttttgggttactgaaactgtcacccagccctggggcgtcattacacatttgattttattcggctggtttctctggtgtctgcgttttcgcattaaggctgcctttgtattatttgccattctggcggccgcaatccttgtgggacaaggcgttaaatcctggatcaaagacaaagtccaggaaccacgaccttttgttatctggctggaaaaaacacatcatattccggttgatgagttctacactttaaagcgagcagaacgcggaaatctagtgaaagaacagttggctgaagagaaaaatatcccacaatatttgcgtagtcactggcagaaagagacggggtttgcctttccttccggtcacacgatgtttgctgccagttgggcactgctggccgttggtttgctgtggccgcgtcggcgaacgttaaccattgctatcttgctggtctgggcaacgggagtcatgggaagccgcctgctgctcgggatgcattggccacgcgatctggtagtagctacgttgattagctgggcgctggtggcggtggcaacgtggcttgcgcaacgaatttgtgggccattaacaccacctgcggaagaaaatcgcgaaatagcgcaacgagaacaagaaagttaacgctggttgattttccgaatttagcccttaaatcatcaacaatgcgtgtggatgccatttcgcagacggcgcgaaaatggtactttaaagggctattgcggtaagttgaccataatttattcgctctaaccacataacgggaagtaatgtgaaatatttactcattttcttactggtgttagcgatcttcgtgattagcgtcacgttgggtgcgcagaacgatcaacaggtgacgtttaattatctgttagcgcaaggggagtaccgtatttccacattgctggcggtattgtttgctgcggggtttgctatcggttggttgatttgtggcctgttctggctgcgagttcgtgtttccctggcgcgcgctgaacgtaaaataaagcgactggaaaaccagcttagtcccgcgactgacgtggctgtagtgccgcacagcagtgcggcgaaggaataactttctatgctggagttgttgtttctgcttttgcctgtagccgctgcctatggctggtatatgggccgcagaagtgcgcaacaaaacaagcaagatgaagccaaccgcttgagccgtgattacgtagcgggggttaacttcctgcttagtaatcaacaggataaagcggtagacctgtttctcgatatgcttaaagaggatacaggcaccgttgaagcccaccttacgctcggaaacctgttccgtagccgtggcgaagttgatcgcgctattcgcatccatcagaccctaatggaaagcgccagcctgacctatgaacagcgtctgttggcgattcaacaactggggcgtgattacatggccgccgggttatatgaccgcgcggaagacatgttcaatcagctgaccgatgaaactgacttccgcattggcgcgctgcaacagttgctacaaatctaccaggctaccagtgagtggcagaaagcaattgatgttgccgaacgcctggtgaagctgggtaaagataaacagcgcgtcgaaattgcccatttctactgtgagttagccctgcagcatatggccagcgacgatctcgatcgtgccatgaccttgctaaaaaaaggggcggcggcagataaaaacagcgcccgcgtatccataatgatgggacgcgtgtttatggcgaaaggagaatacgccaaagccgtcgaaagtctgcaacgcgtgatatcccaggacagagaactggtcagcgaaacgctggaaatgttgcaaacctgctatcagcagttgggtaaaactgccgaatgggcagaattcctgcagcgtgcggtggaagagaacaccggtgccgatgctgaattgatgcttgctgatatcatcgaagcgcgcgacggtagtgaggccgcacaggtctatattacgcgccagcttcagcgtcatccgaccatgcgtgtgttccataagttaatggattaccacttaaatgaagcggaagaagggcgtgccaaagagagcctgatggtgctgcgtgacatggttggcgagaaggtacgtagtaagcctcgttatcgttgccagaaatgtggttttaccgcatacaccctctactggcattgtccgtcttgtcgggcctggagtaccattaaaccgattcgcggtcttgatggcctgtaatttttaaaaaaaatccgactttagttacaacatactaattattaatgttccattgtgctccggcaacgacggcgcagaaaaagcctgccaggggagaaatcgcaactgttaattttttatttccacgggtagaatgctcgccgtttacctgtttcgcgccacttccggtgcccatcatcaagaaggtctggtcatgacgttaactgctagttcttcttcccgcgctgttacgaattctcctgtggttgttgcccttgattatcataatcgtgatgacgcgctggcctttgtcgacaagatcgacccacgcgattgtcgtctgaaggtcggcaaagagatgtttacattgtttgggccacagtttgtgcgcgaacttcaacagcgtggttttgatatctttcttgacctgaaattccacgatatccccaacactgcagcgcacgctgtcgctgctgcagctgacttaggcgtgtggatggtgaatgttcatgcctctggtggggcgcgtatgatgaccgcagcgcgtgaggcactggttccgtttggcaaagatgcaccgcttttgattgctgtgacagtgttgaccagcatggaagccagcgacctggtcgatcttggcatgacactgagtcctgcagattatgcagaacgtctggcggcactgacgcaaaaatgtggccttgatggtgtggtgtgttctgctcaggaagctgtgcgctttaaacaggtattcggtcaggagttcaaactggttacgccgggcattcgtccgcaggggagtgaagctggtgaccagcgccgcattatgacgccagaacaggcgttgagcgctggtgttgattatatggtgattggtcgcccggtaacgcaaagcgtagatccagcgcagacgctgaaagcgatcaacgcctctttacagcggagtgcatgatgagtgattccaacagccgtctggtctacagtacggaaaccggacgtattgatgagtccaaagcggcccctgtacgccctaaaggcgacggtgtggtgcgtattcagcgtcagaccagtggacgtaaaggtaagggcgtttgcctgattaccggtgtcgatctcgatgatgccgaactgacaaaacttgcagcggaactgaagaaaaaatgcggctgcggcggagcagttaaagatggagttattgaaatccagggcgataagcgtgatttattaaaaagtctacttgaagcgaaagggatgaaggtaaaactcgcaggcggttaacataaaaagccacggatatatccgtggctttcgaatattttactgtgcgtattattcagttatttcgtactgaacagaatcaagcgtattataattgcgagtcgataatcgacatttatttacgattatttaccgacctggtgaccaataacacctccgacagctgcaccacctaatgtacccaacgtactgccatcggtcagtactgcaccgcctaatgcccctgcacccgcgccgattgcggtgttgcggtcccgtttagaccagttagaacaggcactcagagacattgccaaagtaattgccagaacagccgcggtcatttttttgctcgttacaaacataatactctctcctgaatttatgattcacggaagtaagctctctataactataatagctaagaataagtctggtgaaattattccgtgaaatctgctcgcgcgcagggttatatcacgcaggtgataatgacttcctgttatatcgctgataataattttatatcttgagagtgttaataacaggtaaatagtcttaattatcaaccaggaatcatcttagagcggatgatttgccaaactgcaaatcatccgtagagaagggaaatggttaaatgtcaacgacgtgaatggtgagtttactgtgctcaagatgcatcagatcgctggcgcgtattttgctatcggtaatcacgcgattgaatcgctcaacgggaccgatggagtaactatgtacagcaccaaatttgctgctgtcagtcaggactatcgcttcgcactctttttccagcacggcattgaccacatcggtacgcatcatatcgcgaccggtaaatccagtttcaggttgccagccatcaataccaataaatgctttgctgaaatgcacctgttggatgcactggcgtgtcaaagggccaaccatactttcgctttttttctgatacacgccaccgagcaaaataacttcacaaggcgcgtctttcagcaaatgcgcgatgtagctgctgaccgtgatgatagtgacatttttcttctgctcgcccagagtccgggcgagtagggcattgctgctgccattttcgataaagatggtttcgcccggttgaaccaggctcgcggcaaactcggcgagttcacgcttcagcgtatagttgctcatcatacgggtttcgacgtcatcactatcaaggctaacagcaaagccatgtgcacggcggaggtaactcagtttttcgagtgtgttgagatcctggcgaatggtaacttcagaaactccagtggcttttgccagatcggttacgctaacctgaccctggtcaatgaccatctgtagaatagtttgttgtcgggaattcatcgctgtaattcttataacgttataatacttaataaaaaaatactgacgcgccgggcatcctcaaataggaaaacctgaaggcacgattgttaaatctcccacggtgccttcgggatgtctggcgtagattcagcaacctggcgcaagagttctgctttaagtatctcgagattatggatcgcagagtggtaatcgcctgccacaaggatatctaacacaatatcaatacgttcggcaacgcgctgggcatcaaattcagacatcaaggacatccttatagcaaaagggggaaaatgaataatgcaaaaattgccgctaaaagagaagtgtttaacagcaacggctaattatcatccaggaatacgatatataatgacgggatatagcgctaagtatatatattcatctacttatgcgcgcttcagatagcgtttataccagcgttcgaaggcgacggcgggcatcggtttggcaaacaaaaatccttgccgctcattgatcccgttcttggttaaaaaagcatcttcctttgcactctctacaccttcggcgatcacctgaagattcaatgcctgggccacagcgacgatcgcccggaccagactctggctgacaggttgtttgtgaatatctcgaacaaaaacctggtcaagtttgatggcatcgatcggaaagcgcgccagttggctaagactagagtagccggtaccaaaatcatccagatgcacttgcgcacctagttggctaaattgttgaataacagacagtgccagttcatcattctcaatcagacaactctctgtcagttcaacatctatagggcagtattcaaaattgagttcctggagaacctgtttcagggcggtgaaaatggtttgatcggcgagctgacgtgcagaaatatttaccgccactcgcaggtttatgcctttatcccgccactttgccacctggcgtacgacatcgagaatcacccaacggcctaaaggcacaattagcccactctcttcggcgtaggaaatgaagtccaacggtggaatcaacccacgttcaggactctgccaacgtactagtgcttccagactgcgcacttcgccacgccaggtgattttcggttgatagtgaataaccaactgatcgttttccagtgctttacgcaagttggtatccagccagagatattcaaatacccgttgattcatttctggggtaaaaacgcaaaattgtcctcgtccgccttccttcgctgtgtacattgctgtgtcggcgtgacgaataatagccgtgctgtcactaccatgttcgggagagagtgcaatacctacactacagctggtataaacttcaattaaaccaatgcgaaaggggagccgtaagcgggtcaaaattcgacttgccattgcttccagcgcgctttgactggtgttggatgccagtaccagaaactcatccccacctggacgagccaacacctggtcatgttcgagacagcttaaaatagccaaactcacgtcgcgtaataactggtcaccaaacaaatgcccataggcgtcgttgacctttttgaaattatccaaatcaagatacacaaccccaactttattgttatctgcatgattaatagcgtgatcgattaaatcctgcattgcgttacgattcggcagtccggtgatactgtcggtatttgccagaatacgcagtcgctcctgagcgcggcgctcttcggtaatgtcggtgccggaacagattaaaaaaatctcgtttttgccactgccgctgtggacaaatttattgcgaaacagaaacagccgctggcctttacatgttggtatccacagttcgacttcatatgcattgccgcttcgaaaaaatacacggttattgcgcctggatgccgcagcttcacgacggctcataaacagtttaaacacgctttgcccaatgacgtcgtgttctttcaaccctgtgtaatcttcacataaccgattgaagcgttggatattcccccggctgtcgagaatcactattgcggaatatgcttcagaaactacctgctcagcaaaggaaagcccgtgacttaaatcacgagcaaccgccggtgtgtcatgccatgcagacgcgttgccagcccattcccgtttattgatttttcgtcctaccagatgcacagaaagatcgctttcatcgacggtcagactcatcatcaggctggaggtgatggccgtcatttccctgatgcgagcagcctgttcggcagataactgcaatgtacgatcaggttctgtggtttcggtggtagaaaagcgcaaaacatcgctgctttccgtcaaccgccagtatggattgtggcttccgagaaagttgtacaacgttgtggactccctaacggttttcatgatgcatatcctccggttaacagcggagtccgcggttaaataaaaggaacaacatgacttacatgaaattaacggcggctaaacgcattgttttttttatatatttatttgtaatccagttttggaaaaacgccagttttcaaacgaaagtcagttaaaaaatctgcctggatataacgaaggtagagcggggaaataaacggcccatccatgaggaatgggccgtgaaaggagattacgcgaccgggcgcgcaataatgctgcgggtttccatgcggacttcggcaatagtgacgtcaataacgtcagtcactttgtaaaccgtttcacctttaatttgtacagtgccgttttcctggctgcaaaccagttcatcgcgcacagcgtgtaagaaaggtgccggaataaaggcgatagcgccgttatcaaccaaacgaacacgcatgccgccacggctgatatcgacaatttccgctgcgaaacgggtgtcggtcccggctttgtctttcaggaagcgtgcgtataaccagtcaccaacatcacgttctgccatccggttgagacggcgacgctcggccatttggacagtgatttcatcctgtgggcgcgtcgcagtttcgcctttgataaccgctttcagcagacggtggttgatcatgtcgccatatttacggatcgggctagtccaggtggcgtatgcttccagaccgaggccaaagtgaggaccgggttcagtgctaatttcagcaaaactctggaagcgacgaatgcggctgtcgaggaaaccagttggttgcgcgtccagttcacgacgcagtttgcagaaaccgtccagcgtgagcacttcttcggcatcgacatgcagaccgtgcgttttcagcaacgctgccagcgcgtcggcattcgccggatcaaagcccatatgcacgttatagatgccaaaaccgagcttatcgcgcagtacgcgggccgcacaaatgttagcggcaatcatcgcttcttcgacgatacggttggcaatgcgacgaggctcggcgacgatatccagcacttcacctttttcaccgagaataaagcggtaatccgggcgatctttaaacaccagtgcgtggttatgacgccactcgccgcggcgttggcaaatttgcgctagcaaacggacttgttcggcaattgcttcactttcaggctgccagtcaccggtattttccagccagtcagaaacctggtcatacaccagctttgctttggattcgatggtggcggcaaagaattcgatattatcttcaatggtgccatcagcggagagcgtcatgcggcatgccagtaccgggcggacttcattggcgcgcagactgcagagatcgtcagaaagctcgcgaggcagcatagggatgttgaagccaggcagatagttggtgaatgcgcgaattttcgcggctttgtccagcttgctgccttcagcaatccacgcggttggatcggcaatcgccacaatcagctgaagtttgtcatccggcaacgccttagcgaaaagggcgtcatccatatcttctgtgctggcactgtcgatggtgacaaaatccagcgcggtcagatcttcacgaaccagaccttcatcgagcatttcggtagcgacgccgtctggtgcttctttttccagattatggcgtgcaagggtaacccaccacggtacaaagtgatcgtcaccaaaagtgatgtattgtgtcagttctgcatagaaagaacgatcgcctttcagcggatgacggcgcatttcggcaaccgcccagtcgccttctttaaactcgtggttcaggccacgggctgcgcggcaaggaatggcgtcttttaagagtggatgatcaggaacgatggccagacggtcatttttgccctgaaccttacccacgaaacgagtcaggaacggttcaaccagttcttctggctctgcggattcacgttctttttcactgtggatcaccgcgataattcggtcgccatgcatgacttttttcatctgcggcggcggaatgaaataacttttttgcgcgtcgacttccaggaagccaaagcctttttctgtggcttttaccaccccttcagcgcgtggcgtctgggaatgcagttgctgtttaagctgcgctagcagcgggttgtcctgaaacataattgtctattttggtggccattagagcggctgacagttttacgcgaatctgtctgacgcggcaaggttaatatgtctcacccaacgcgatttttaagcgatttatccagccacacagcccgctccataccagcagattaataatctgcgtactacttttttcgtgttcgagtaaagggctgaactgggcggcgctaaagcgatcgggtgctcgggtcagccattgtatcgcctgaacggtagcgcgctcaacagaatgacggtcagcccattggttaatttcattttcgcccttgcgcataagggtgctgatttttttatattcattactactatccatacaggtggcaaaacaagcaggactgccatttatacgcgcgcataacaacgccgcaagctgattatccggctgtgtattgccccgtgtgctgtttaacaacttttcgagaagggaaagactaatagggtggagagagagtatttcggccagttggcaaagttctgcagtactactttttgtgtgctcttcaggtagtttttccacctcatagctgcttcgccagcgtaaactttcatcagcaaacagactcgcgtcggcgtagttttgtatctccagcccgggtaaccagcgtaccggatgcccgagataagcctgaaatgtcgcaattgtccgcgcctgaaagccaataaaaccaatgatttggctaatgatcacacagtcccaggcagtaagaccgacgtcattcagatgctggcggcttcggttgtcgataatagaagggctgctagccagttggcgggcatattgcgtgatttgtgccaaccgatgattactttccctggtggaatcaggcccggggagcggcgtaagtcgcgcgctatagtagttacataaccgctggacgccgcaaacctgagcaaccgtcagggccgtgctcaagcgttcataagcggtgaaggtctgactacgggtcacggtaagctggtcagggaacaaatccactgcaagaacacgcgcagggtccagccaactaaggaagggggccagcgtttctttttcaaggatcacgtcgagtagaaagggatcgctgacctttgcggcttccgggaccagaggcagaacgtcatactccgtagtactggattgcgtttcatgataccagtggcttttgccggtgatgtggcgttgttccatgggcgctccttggtcgtaaaggaaatcgttatcctgacgcaaggcgggaaggggagaaagacggatcggcgataacaaatatcagaaaggtataacagagataacgggcggcagaacgccgcccatctttaccaacagaacgattatttcagttcgagttcgttcattgcagcaatgctgaaaccgccgtcaacgtggaccacttcaccggagataccggcagagagatcggagcacaggaatgccgcagagttacccacatcttcaatagtaacggtacggcgaatcggggtaacggcttcgcaatgagccagcattttgcggaagtctttgataccggaggccgccagagtacggatcggaccagcagagatggcgttaacacgcacaccttccggacccatcgcgttcgccatatagcgcacgttcgcttccagagacgcttttgccagacccataacgttgtagttcgggatagcgcgctcagcgccaaggtaggaaagggtcagcagggcagaacccggattcagcatggagcggcaagcttttgccattgcaacgaagctgtaggagctgatgtcgtgggcaattttgaagccttcacgggtaacggcgttaacatagtcaccatccagctgatcgccaggtgcaaaaccaatagagtgtacgaaaccgtcaaatttcggccaaactttccccagttcagcgaacatggtgtcgatgctggcatcttctgcaacatcgcactgcagaacgatgtcagaacccaattgagcggcaaattcttctacgcggcctttcagtttgtcgttctggtaggtgaatgccagttcagctccttcgcggtgcatcgcctgagcgataccgtaggcgatggatagtttgctggcaacaccggttaccagaatgcgcttaccggaaagaaaacccatagctttaatccttattgttgatgcttgttgtgcctgaaaatcaggcgattcgtcgttttagtaaacagtacgaacagataaacggttattataatcaacctggctgtgagtagctatagttgccaggtccgaccggagcaggctgcggcagggggggcgcttttcccctcaccctaaccctctccccagaggggcgaggggaccgtattgtgcaaatattgttaccccagcaacaaacaggctcatacagcccctaaccctttcatggcgatggctgggacggttcagaccttgccgaatattctccagcaccgtctccatgttttcaccacaacagctattcggctcggtctgccccctcgctctttcagggagagggactccggcggttcagttcctgcagaatattctccagcaccgtctcctcattacaatcaatctcgttattccagaaacgcagcacggtccagccctggctctcaagccagctagtgcgcctggaatcataggcaactgctaaatcatgctgcccaccatccagctcaacgactacacgcgcgctgcagcaagcaaaatcgagaatgtagctccccactggatgttgacggcgaaatttgaaatcactaaaacgtcggctgcgaagatatcgccagagctttcgttcctgcaaagtgagattgcgtcttaaatcacgcgcattacttttaattttatctatcacctcattctgacaagatttaatcttttgtcagaatgaggtgaataatctggaaggaggattcagaaaattagcgatctttacgccacgcatccgccgtcaatgcctcgccaaaatgaccggcaatcagccgtttggtgagttcatgcagcgggcttgccagcacatccgcggtgctgcctcgctcgacaacctcgccctgatgcatcaccagcacctggtcgctaatgtgcttcatcattccgatatgctgggtaacataaatatagctaatgccctgtttttcctgtaattccagcatcagattaatcaactggctacgcatgctcatatccagactagcgagggcttcatcggcaataatgacttttgggcgcaatatcagcgcgcgcgccagacccagacgctgtttttgtccgggtgccaacatatgcggatagtaactgacgtgatccggtagcagcccaaccatacgcatcgtttcaataatctgtttgcgacgctgttccggttccaggtcggtgttcaggcgcagtggaaaatccagaatttggctgatacgttgacggggattcaagctggtgctaggatcctgaaaaatcatgcgaatacgctgactgcggaaggaataatcgccaaaatgcagtggatgatcgtcaatcaataactcgccgctggtaggctctatcattcccgccagcatttttgccagcgtggatttaccgctaccattctcgccaataatcgccagtgtctggccttcacgtagcgtaaagctcaagggttttaccgcttctacggtctgacgacgaaaccagccggtccggtagcggaacgttttacttaaattacgcacttcaagcagcgtttcgatcatctcactctttctccatgttcagcgggaaatgacaggcatagagatgatttttcgcccccgtcaaacgtggcgtcacaatgcattctcgttgtgcatacgggcaacgtggccccagacgacaaccaatcggtaactgttccagcagtgggatagcgccgggcagcgtattgaggcgacttttatgcggcatcgcgctgccgaagtctggtatcgcgcggatcagcgcctgggtataaggatgatgtggcatcgtcaccaactccttactcggcgcggtttccactgtttgaccgcagtaaagcacgttaattttatccgcccattggctaagcatttgtaagtcatggctgataagcaaaatagtggtattgctgttttggttgagacgcgtcagcaggcgaaagatttgcgcctgggttgttggctccatactgttggtcggttcgtcagcaatcagcagacgcggttgattcgccagtgcaatggctatcatcactttctgacattcaccttcggtcaactcatagggaaaactgcgcatcgcatctttgtgatctttaatccccacgcggtgcagcagttcaatggcacggcgtttgcgccagccaaaacgctgccaccaacggcctttataggtccaggctgggatgttttgcatcaactggcggcccacacgttcactagggtcaagacagctctgcggttcctggaaaatcatgctcacgttatggccaaccagtttgcgccgttcgcgtgcggagagacgcagcaaatcgatatcatcaaaacgcatacggtcagcagtaacacgccagttatctttattcaccccacaaatcgctttcgcaatcaaactcttgccggaaccggattcaccaacaagaccgcggatttcaccttcggttaaggtcatacttacccggtcgacggctttaacccactcatcaccggttttaaattcaatggtcaggttacgaatatcgagtaatggcattattccacccccgcaataatcgcacgacgaacgccatcgccaaggaggttaaccaacaacacgctaatcataattgccgcacctggcagcatgacagtccacggggcgacataaatcagttccagcgcatcaccgagcatcgctccccattcagggctggggagttgtgcgccgagatcgagaaagcccagcgcggcgatatcgagaattgccatgctcagtgcgcgggtgatctcggtgaccagcccggcggtgatgtttggcatcacagcaaaccagagaatattcagcgtacttgcgccatccagacgggcggcgataacgtactctttttccagttcgtcatgcaccatgctgtaaatgctacgtaccatacgcggcagcaatgccagccagacagcaaacatagcgtgggacaaactcggtccggcaaacgctacaacgataattgccaacagcaggctagggatcgccagtaaggtatccagaatatggttaagcaccgcactgcggaggccgtgtgtcgccccggcgaaggtgcccagtaccaggccacagatcgtcgcggcaagcgtcaccacaaatgcgccacccacggttggcgcagctccgctcagtaaacggcttaaaacatcgcgtccgaggtcgtcagtccccaggaagaaagaaacttcgccatagcggctccaactcggcggcaataattgataaccgagaaattgctggtcgatgccgtaaggcgcaaaccagccgccaaaaatacacagtacagccagccccgcgcagccgtacaggccgaccatcgcagaggcgtcactataaaatttgcgccaggcggtacgcagcgtgcccggcgggcgcttttcgctgtatacgctatcgtaaggcataccattccttatgtttcagattatttatcgtaaggcataccattccttatgtttcagagggttagccatggcacccaaaatatcagaaatcacgttaacaataatgaccagactgccacacaccatcactccggcggaaatggctgcgtaatcctgctggcggatggcgttaattaaccagcgccctaaacccggccagctaaaaaccatttcggtgatcatcgccagcgtcagcatggtggaaaactgtaagcccaggcgaggaataaccggcggtaacgcgttatgcagaacgtggcgacgcaaaatagtaaagcggctcaaaccgcgggtcgccgccgcttttacatagttctggtcatacacttcgatagtgctgatacgcatcaggcggatcacttcagttgttggcgcaacgctcagggtgatcacgggcaatatcatatggcggattgcgctcatgatcatttcatcccgccatggactgtcgctaagccaggcatcaatcaacgcaaaaccggtaatcggtttcacttcgtagagcagatcgaaacgcccactaacgggcaaccaacctagcgtgagactacaaaacagcgtcaacagaagcgccagccagaacaccgggatactaaagcccagtaaggcgatggcgttgatcaagttatcctgccacttatggcgcgtaatcccggcaatcatccccacggggatgccaacaatcagcgcaaaaccgaaggcgaggatgcacagttccatcgtcgccgggaagacctcttttaactgttcggcaatcggttgaccgttaatgctggaaacaccaaaatcccagtggatcaggccgttaaaccagaacacccaggcattccacagactcgcgccttgtaacggcgcatgaggggtgaaatagctcaagctgaagccaacgaaggtcagcaggaacaaggtgacaatcaataacaaaatgcggcgtaaggtgaagataatcatggttttttcacctcatcctgtttctcgcgatacaccccagcaaaggaggcgttaccaaacgggctaagtaccagacctttgatatcgtaccgataggcctgcaaacgcaaactgctcgccagcggcaaaatgggcaattcctgcgccagaatactctgcgcttcgtcataggcttcaatacgcgccgccagctgctggctagagagcgccttacgcaatacgctgtcgaatttcggatcgcaccagtgggcgaggttggtctggctatgaattgccgcgcagctcagtaacggacggaagaaactgtccgggtcgttactgtccgtcgcccaaccggataacgtcagatcatggctcatatccatcaaccgcgcctcctgaaagcgaccttctaccggcacaatcaccacttttacgccaacctgcgccatatccgcctgaatcagttcggcagttttcagtggactggggttccacgcctggctacgtgtgggcacccacagtttcagcgttaaattttccagccccaagctcttcaactgttcgcggcttttcgccggattgtattcagtaattttagcctcgttgtcataggcccagctggcgcgcggtaaaatagaggccgccgtttcagccgtaccataatagatggattgcatcaggcgctggttattaatcgccagtgccagcgcatggcggacagcgggattatttagcggcggtttggcggtgttaaatgccagataggcgacgttcatcccaggacgcagcgttaaacgcaagcgcgggtcgtcacgcaaaatggatagctggctggcagcaggccaggccagaacgtcgcattccccggtcaggagtttgctcagacgtccggtgccgccggagcctaaatccaccactacctgcggcattaacggtttaccgcgccagaagtcatcatgacgttgtaggcgaataaattgcccggcgcggtattcgctcaactgatacggaccggtgccgaccggttgacggtcgagttgctcctggcgatcttctttctctaacttccgggcatattctgcgctcatgacgctagcataatgggttgcgaggtgccacaaaaaagaagcatccggctgggcgagtcggaactcaacggtatgattatccagtttgcggacgcttttcacgttatcggcaaattgcaggctgtcgaagtaggggaagttgctgccgttgacgttatgccacgggttgttgcggtcaaaaattcgctggaaggtaaacaccacatcgtcggcattcattttacgagtgggagtaaaccagtcggttttttgaaacggaacatcgcgacgcaggtggaagcgataggtcgcgccgttgtcgagtacttcccagctttcggcaagttccggcatcaggcgataggtatagggatcgacatccagcagtcgatcataaaactgggcggcaagggtatcgacaattaacccactgctcgctttggatgggttaaaggtgttgacttgcccgctgacgcaatagacaaaaccgctgtcgcggatatcagcatgcgggggagattcaggcgcggcgattgcctgaccactcacaagtccagcaatcaccaaaagagagcttaatacctggcgcataatattaagggattttatgtaaagaggctatcttactaatatttaatgacatttgccattaccgtttgtgttcaggggtcgtaatgagggccgtgtggttggtcgttgaacaggtgacgtcgccatctgttcaacattcgtacccgtgatttctctataactataactcacagaacaacttagcgaggagcagagcggtacgatcgtgagaaacccattaaagcacgctgcagtgcgtgtcattgttagccagatgcggcgtgaacgctttatccggacaacgatactgaccgatcgtctgcaattaaatcattactcattaccccattgattcaaaaactctgcgatctcatcaatgcgtacgggattaatccccgcttcagcagccatttcatgttgggcttcttcgctgatctcttcattgttcatcaaacgggtgagcagtaactggaagtagtgggccagcggtgtgcgttcagcctctgcgacaggctctgcgcattcggtcgcgtactcatcggcaatatcaaaatattttagcgggatatcgtggttcattatttgcccctggggttaatgcgctaagcataagggcggatgatagcactcgtgatccgggtcatacatctttttatagttaatggcgcggcgcgttaccctcaggcaggataatgcgccgcgcatccgactattacgtttcactcaccggcgttctgtcaccatcatacaacggcactttgcgatagcggcggatcagataccataaatatgcgccgcctaagctagcccataccagaccgagtgtcagactcgtactctcgaggttaacccacagcacacccaccgtcagcgcgccaaccagcggcatcagcaaatagtggaagtgatccttccagcttttattcattcctttacgccgccagaaatgattaaacacgctcagattcacgaaggtaaacgccaccagagcaccgaagttaattaacgctgtggcggtaactaaatcgaagaacagcgcgctcaacgcgacaatcccgaccataatgacgttgagtgccggagtccgccattttgggtgcacatagccaaacacgcgctccggaaacacattgtcacgccccatcacatacagcagacggctcacgctggcatgactagccaggccagaggctaacgtgttcacaaacgtggtgcagaggaaaatgctctggaagagcttgccgccgacgtacagcgcaatttcaggcagtgcggcatccggatctttaaagcggctgatatcgggaaagaacagctgcataaagaagctcgccgcgataaagataacgccaccgtagaccgccgtcaggaagatggctttcgggatcacgcgtgcggcgtccggcgtctcttcgctaagcgtggtcaccgcatcgaaaccgaggaaggagaaacagacaatcgtcgccccggtaataatcgggatcaggtgcgcgttctcgctgataaacggctgaagactccagacggtgccaacgccttctcctttatgcagtccctgaactaccaggaagataaacaccaccatgatggagatttgcaccagtacaaacagggtattgaagttagcgaccaggttgacgctcttcagattcgcggcggttaaaatggcgacgaaggttaccacccacacccacggcggcacttccgggaagagggcggagagatagattttcgccaacaagacgttaatcatcggcaaaaagagataatccagcaggctactccagccgaccataaatccgacgtgcgggttaatgctcttttgcgcgtaggtataggcgctaccggcctccggaaactggcgaaccagtttgccgtagctgatagcggtaaacagcacacccgccagcgccagcaaataggacgccggaacgtgaccgtcgctaatgccggagacaataccaaaagtatcaaatacggtcatcggcgtgagataggccagacccatcatcaccacctgccacaatttcagactttttcgcagacgggttttgccgggttgcgcagcaatattcagtggactattaatagccataattgctgcctcccctgcgtaataaggtttgcggtcgtgtcgacctgaaatcaaacctgtttagcaagggaagcaaagggggcggagtccagtcagtagcaggaggggcgcatacgcagcctccctcgccatgcggggatttaatcatcggcatcatctcatttcctcgtcacagtcttaatcgttaacggaagcccgttgccgcccgcgctccataacgcgacatccgggaaatgtctggattaccagcaaatgtcaggcctggctccgctcaggccgatgaaacaaccccgcaaggggtattacgcgtttttcaacatccactcaatttctgtttctgtgatgaggcgctcaaactgcaacagctcatcatttttacaggcgtgatagacatggcagaagcgttcgcctaaatagcggcgcaggtgatcattctcgataaactcacccagggcatcgctctggcgaatcggaaagggtaagccttcctgttccagcccgttgccttcgacttcttcctgcaacggcagctcgttatcaaggccatgcaaaataccggcaaaaatcgctgccatcaccagatatgggttggcatcggcacccgccacgcgatattccacgcggtgattatgacggtcgccgcacggaatacgcagggcgacggtgcggttgttatggccccagctcgcctgcgtcggcacatacattcccggctggaagcggcgatagctgttcacgtttggtgccagcaacgccatgctgctcggcatcaggtcaatcatcccggcgagcatctttttcagcagcgggctatcttcgccttccgcgtcagaaagcacgttctcgccacgattattttgcatactgatatggatatgcattccgctgcccgcgtgctcttcatacggcttcgccataaaagtggcgtgcatcttatgcttttctgccatcagacgcaccaggcgttttagtgccagcgcatcatcgcaggcttccagcacgttatcagtatggtaaaggttgatttcaaactgacccgggctggcctcagcgaccgcgccatctgccggaatcagctgtaactgcgccagttcatcaatatcattgagcacgtcggcgaagtggttgaggttatcaacggagtaaacctggctttgtgtattgcggtcatcggtgccaggcgcgcagggcggttgcagatacccttcagcgtcgcgctggcgatccagtaaatagaactccagctctaccgctacgaccgggaacaatccgcgctggcgcagctgctgccacaggcggttaagaacgttccgcggctcaacgtcaaagggagcgccatcttcatcgaccatggtcaggagcatctgaccgataaactctggatcggcggcagaaggagttaaggaaccgagaacaggaacacaggtacgatccggctcgcccatttcctgacccagacctgcttcttctactacgttgcccagaatatccattgcaaatacgctggccgggaaataacaccctttctcgagcttcttcaggctactaacaggaatacgctttccacggaagcaaccatttaaatcggtaagtaaaacatcaacatattgcgtattcgggtagcgctccaggtagcgtttcacttcctgcgtaaaggcgctaccccgcctctcttcactctgctgaacaaagttctctacttcaacgatattggtttccatgattcttcgcctttggtttgttttccgctcgttatcaaagcgtaaaatataatgaccaccattcgaatctgtatgcaaactaaatgtttgtcaaatgttaaattgagtttgcaaaaatgaaaacccactgctagattgaaaaaatattgaacataaaggtcatttaaagcgcagtaatggcgataatttagtccactttgtgagattgagcatggaaaatataatgaacaatccggttatcggtgtcgtaatgtgcaggaacaggcttaagggtcatgcgacccagactctgcaagaaaagtacctgaatgccatcatccatgcaggcggcttgcctattgcgctaccacatgcgctggcggaaccgagtttacttgaacaacttttgccgaaactcgatggcatttatcttcctggtagtcccagcaatgtgcagccgcacctatatggtgaaaacggcgatgagcctgacgccgatcccgggcgtgatcttctgagcatggcgataattaatgccgcactcgaaaggcgcatccccattttcgccatctgccggggtttacaagaactggtggtggcaaccggtggtagcttgcatcgcaagctgtgcgaacagcctgaattgctggaacatcgggaagatcccgaactgccggtggaacagcaatatgcaccgagccatgaagttcaggttgaagaggggggattactgtctgcgttgttacctgaatgtagcaacttttgggtaaactctctacatggacaaggggcgaaggtcgttagcccacggttgcgtgttgaagctcgcagcccggatggcttagttgaggcggttagcgtcatcaatcatccttttgcgctgggcgtacagtggcacccggaatggaacagtagcgagtacgcgcttagccgtatattgttcgagggctttatcaccgcttgtcagcaccatatcgctgaaaaacagcgactctgaccactacagtttaaggaaatgcaaatatgagtgatgagggactggcgccaggaaaacgcttgagcgaaatccgccagcagcaggggcttagtcaacgtcgtgccgccgaactctccgggctgactcacagtgctatcagtacgatagaacaagataaagtcagccctgccatcagtacgctgcaaaagctgctgaaggtgtatggtctgagtctcagcgaattcttttccgagccggaaaaacctgatgagccgcaggtcgtcattaatcaggacgacttaattgagatgggtagtcagggtgtgagtatgaagctggttcataacggtaacccgaatcgcacgctggcgatgatctttgaaacgtaccagccgggcacaaccactggggaaagaattaagcatcagggtgaggaaataggcactgtactggaaggtgaaattgttctgacgattaatggtcaggattaccacctcgtcgcggggcaaagttatgccattaataccggcatcccgcacagtttcagtaatacgagcgcaggtatttgccgaattatcagcgcccatacgcccaccacgttttaatctttttgttctgtaagccgggtaagcgcaatgcgcccggcaatctatacacaaaatcattcaagttgcatcaaggcggcaagtgagcgaatcccgatgagcttactcaggtaagtgattcgggggagcgaacgcagccaaggcagaggcggcttgaaggatgaagtgtatataaagaatgtcgccagaaataaacgggcatacggcccggggatctctgcgccctgacgttcacaaactgcatatatctgatagacgtgaaacaggagtcataatgaattttcatcatctggcttactggcaggataaagcgttaagtctcgccattgaaaaccgcttatttattaacggtgaatatactgctgcggcggaaaatgaaacctttgaaaccgttgatccggtcacccaggcaccgctggcgaaaattgcccgcggcaagagcgtcgatatcgaccgtgcgatgagcgcagcacgcggcgtatttgaacgcggcgactggagtctctcttctccggctaaacgtaaagcggtactgaataaactcgccgatttaatggaagcccacgccgaagagctggcactgctggaaactctcgacaccggcaaaccgattcgtcacagtctgcgtgatgatattcccggcgcggcgcgcgccattcgctggtacgccgaagcgatcgacaaagtgtatggcgaagtggcgaccaccagtagccatgagctggcgatgatcgtgcgtgaaccggtcggcgtgattgccgccatcgtgccgtggaacttcccgctgttgctgacttgctggaaactcggcccggcgctggcggcgggaaacagcgtgattctaaaaccgtctgaaaaaagtccgctcagtgcgattcgtctcgcggggctggcgaaagaagcaggcttgccggatggtgtgttgaacgtggtgacgggttttggtcatgaagccgggcaggcgctgagccgtcataacgatatcgacgccattgcctttaccggtagtacccgtaccgggaaacagctgctgaaagatgcgggcgacagcaacatgaaacgcgtctggctggaagcgggcggcaaaagcgccaacatcgttttcgctgactgcccggatttgcaacaggcggcaagcgccaccgcagcaggcattttctacaaccagggacaggtgtgcatcgccggaacgcgcctgttgctggaagagagcatcgccgatgaattcttagccctgttaaaacagcaggcgcaaaactggcagccgggccatccacttgatcccgcaaccaccatgggcaccttaatcgactgcgcccacgccgacagcgtccatagctttattcgggaaggcgaaagcaaagggcaactgttgttggatggccgtaacgccgggctggctgccgccatcggcccgaccatctttgtggatgtggacccgaatgcgtccttaagtcgcgaagagattttcggtccggtgctggtggtcacgcgtttcacaagtgaagaacaggcgctacagcttgccaacgacagccagtacggccttggcgcggcggtatggacgcgcgacctctcccgcgcgcaccgcatgagccgacgcctgaaagccggttccgtcttcgtcaataactacaacgacggcgatatgaccgtgccgtttggcggctataagcagagcggcaacggtcgcgacaaatccctgcatgcccttgaaaaattcactgaactgaaaaccatctggataagcctggaggcctgaaatgaccgaacataccagcagttactacgccgccagtgcgaataaatatgcaccattcgacacgctgaatgagagtatcacctgcgacgtttgcgtggttggcggcggctataccgggctctcctccgcgctgcatctggcggaagcgggctttgacgtagtggttctcgaagccagtcgcatcggctttggcgcaagcgggcgcaatggcggacagcttgtgaactcctacagccgcgacatcgacgtgatcgaaaaaagctacggcatggacaccgcccgtatgctcggcagcatgatgttcgaaggtggtgagatcatccgcgaacgtatcaaacgttatcagattgactgcgactaccgccccggcggcctgtttgtggcgatgaatgataaacagctcgccacacttgaagagcagaaagagaactgggaacgctacggcaataaacagctggaattgctggacgccaacgccattcgccgtgaagtagccagcgatcgctataccggtgcgctgctggatcacagcggtgggcatattcatccgctaaaccttgccattggcgaagcggacgccatccgcctcaacggcgggcgcgtgtatgaactttctgccgtgacgcagatccagcacaccacgccagccgttgtgcgaactgccaaaggtcaggtgacggcgaagtatgtgattgtcgccgggaatgcgtatctgggcgataaagtagagccggaactggcgaaacgcagcatgccgtgcggcacgcaggtgatcaccaccgaacggctgagcgaagatttagcccgtagcctgatcccgaaaaactactgtgtggaagactgtaactatctgcttgattactaccgtcttaccgccgacaaccgcctgctgtacggcggcggcgtggtctacggcgcgcgcgacccggatgacgttgagcgccttgtggtgccgaaactgctgaaaaccttcccgcagctgaagggcgtgaaaattgattaccgctggacgggcaacttcctgctgaccctgagccgtatgccgcagtttggtcgcctcgataccaacatctattacatgcagggctacagcggccacggcgtgacctgtactcatctagccggacgtttgattgccgaactgctgcgcggcgacgccgaacgtttcgatgccttcgccaatctgccgcattacccgttccccggcgggcgcacgctgcgtgtgccgtttaccgcgatgggcgcggcgtattacagcctgcgcgatcgtctgggcgtttaattttcgattaaccgtgaagagtcaaaaggtgtgaaacatgagcaacaatgaattccatcagcgtcgtctttctgccactccgcgcggggttggcgtgatgtgtaacttcttcgcccagagcgctgaaaacgccacgctgaaggatgttgagggcaacgagtacatcgatttcgccgcaggcattgcggtgctgaataccggacatcgccaccctgatctggtcgcggcggtggagcagcaactgcaacagtttacccacaccgcgtatcagattgtgccgtatgaaagctacgtcaccctggcggagaaaatcaacgcccttgccccggtgagcgggcaggccaaaaccgcgttcttcaccaccggtgcggaagcggtggaaaacgcggtgaaaattgctcgcgcccataccggacgccctggcgtgattgcgtttagcggcggctttcacggtcgtacgtatatgaccatggcgctgaccggaaaagttgcgccgtacaaaatcggcttcggcccgttccctggtagcgtgtatcacgtaccttatccgagtgatttacacggcattagtacacaggactccctcgacgccatcgaacgcttgtttaaaagtgacatcgaagcgaagcaggtggcggcgattattttcgaaccggtgcagggcgagggcggtttcaacgttgcgccaaaagagctggttgccgctattcgccgcctgtgcgacgagcacggtattgtgatgattgctgatgaagtgcaaagcggctttgcgcgtaccggtaagctgtttgccatggatcattacgccgataagccggatttaatgacgatggcgaaaagcctcgcgggcgggatgccgcttagcggcgtggtcggtaacgcgaatattatggacgcacccgcgccgggcgggcttggcggcacctacgccggtaacccgctggcggtggctgccgcgcacgcggtgctcaacattatcgacaaagaaagtctctgcgaacgcgcgaatcaactgggccagcgtctcaaaaacacgttgattgatgccaaagaaagcgttccggccattgctgcggtacgcggcctggggagcatgattgcggtagagtttaacgatccgcaaacgggcgagccgagtgcggcgattgcacagaaaatccagcaacgcgcgctggcgcaggggctgctcctgctgacctgtggcgcatacggcaacgtgattcgcttcctgtatccgctgaccatcccggatgcgcaattcgatgcggcaatgaaaattttgcaggatgcgctgagcgattaatagcccaacgcaataatgtctgatgcgctgcgcttatcaggcctgcaaacgacgtattgattatgtatgccgaataaagcattcacgccgcatccggcaagttgtattgctcaacttcgttaaatctggtgctttttcaacaacgcgcggaactgatgataagttaaccccagtaattcagccgcgcgcttctggttatatttcccttgttgcaaactgagttgcagcaactctttttcctgctgcatctgaaactcacgtaaatccagcggcagtgttggaaggctggtggtttcactaacggcgatagcgtcttcaggcggacgccgtttaaagggatcaataatgatgtcatcaagcggataatcgctggtgccgtggcgatacacactacgttccaccacgtttttcaattcacgaatatttcccggccaacgataattcagcaatgtttctctggcgcgctccgtaaaccccgggaacagaggcagcttgatttcccgacacatctggatggcaaagtattctgccatcaacattatgtcgctttcgcgctcgcgcagtggtggcagttgtacaacatcaaaagccagtcggtcgagcaggtcagcgcgaaaagtgccttcattgaccatcgccgggagatcggcattcgtcgcgcataccaaccgcacattcacctgcaatggttggctgccgccaacgcgctccagttcaccgtactcaatcacgcgcaataatttctcctgcaccatcatcggtgccgtagcgagttcatcaagaaatagcgtaccgccgtcggcacgttcaaatctccctggatgacgtttttgcgcaccggtaaacgcccccgcttcgtgaccaaacagttcggaatccagcagattttcatttaacgccgcgcagttaagggaaataaacggcccttgccaacgggaggagagataatgcaggcggctggcaatcagctctttaccggtgccgcgttcgccgatgatgagcaccggtttgtccagcggtgcgagatggctaacctgttccagcacttcgagaaagctgttcgcctcaccaagtaaattatctttgtattctgccatgatgaaattcgccacttgttagtgtaattcgctaactcatcctggcatgttgctgttgattcttcaatcagatctttataaatcaaaaagataaaaaattggcacgcaaattgtattaacagttcagcaggacaatcctgaacgcagaaatcaagaggacaacattatgggtattttttctcgctttgccgacatcgtgaatgccaacatcaacgctctgttagagaaagcggaagatccacagaaactggttcgtctgatgatccaggagatggaagatacactggttgaagtacgttctactagcgcgcgcgcgttggcagaaaagaaacagctgactcgccgtattgaacaagcgagcgcgcgtgaggttgaatggcaggaaaaagccgaactggcgctgctgaaagagagagaggatctggcacgtgcagcgttaattgaaaaacagaaactgaccgatctgattaagtccctggaacatgaagtgacgctggtggacgatacgctggcacgcatgaagaaagagattggcgagctggaaaacaaattgagcgaaacacgcgctcgccagcaggcattgatgttacgtcatcaggcggcaaacagcagccgcgatgtgcgtcgtcagctggacagtggcaaactggatgaagcaatggctcgtttcgaatctttcgaacgtcgtattgaccagatggaagcggaagcagaaagccacagcttcggtaaacaaaaaagcctggacgatcagtttgccgaactgaaagccgatgatgcaatcagcgaacaactggcacaattaaaagccaaaatgaagcaagacaatcaataataacatccaggcggcgtccgaacgcgccgccgctcatcgtctaaggagtacttatgagcgcgctatttctggctattccgttaaccatttttgtgctgtttgttttaccgatctggttatggctgcattacagcaatcgttctggtcgcagtgaattgagccaaagtgagcagcagcgattagcgcaactggctgatgaagcaaaacggatgcgcgaacgtattcaggcgctggaatctattcttgatgcagaacatccgaactggagggatcgctaatggcgggcattaatctcaataaaaaattatggcgtattccacagcagggcatggtccgcggcgtctgcgccgggattgccaactattttgatgtaccggtaaaactggtgcgtatcctggtggtgctgagcattttcttcggtctggcgctgtttaccctggttgcttacatcattttgagttttgcgcttgatccaatgccggacaacatggcctttggtgagcagctaccttccagcagcgaattgctggatgaagtcgaccgtgaactggcggcaagtgaaacgcgtttacgcgagatggaacgttatgtcacttccgatactttcacgttacgtagccgtttccgtcaactgtgaggaaagttatgaatactcgctggcaacaggccgggcaaaaggtaaagcctggtttcaaattagcaggcaagctggtacttcttaccgcactgcgctatggcccggcgggtgtggcgggctgggcgataaaaagtgttgctcgccgaccgctgaaaatgttgctggctgtggcgctggaaccgctgttaagtcgggctgctaataaactggcacagcgttataaaaggtgaggggagtttcgcaaaaattgttaaatctcaggcgtataatggatggcaattttcatccatagaaggacgcttacatgtttaaaaaaggcttacttgctctggcactggtgtttagtctgcccgttttcgccgctgaacactggatcgatgttcgtgttccagagcagtatcagcaagagcacgttcagggggccatcaatattcccctgaaggaagtgaaagagcgcattgccaccgccgttccggataaaaacgacaccgtgaaagtgtattgcaatgccggacgccagagtgggcaagcaaaagagatccttagcgagatgggatatacccacgttgagaacgccggtggcctgaaagacatcgcaatgccgaaggtcaaaggttaaaagaattcaccatgagcggcgcttatgcgccgtttttttttctgtcacaccttatttacatccccatagattatttgcgtcagctcacaaatacgctttttccctggtaaaaaatgatttcctgcgtgactaaaacccttgtgctcaattgacagtttattttctgcggagtagtctctcgtttcatgggaccgctaccacggaaaggcaacatgaaacagaaaattacggattacctggacgaaatctacggtggaacatttaccgcaactcatttacagaaacttgtaacgcgtcttgagagtgcgaaacgattaattacacagcgacgtaaaaaacactgggatgaaagtgatgtcgtgttaattacctatgccgatcaatttcacagcaatgatttaaaaccattacccacatttaatcagttttaccatcaatggctgcaaagcatttttagtcatgttcatttgttgccgttttatccatggagttctgatgatggctttagcgtaattgattatcatcaggtcgccagtgaagcgggggagtggcaggatattcagcaactcggtgaatgcagtcatttaatgtttgattttgtctgcaaccatatgagcgcaaaaagtgaatggtttaaaaactatttacaacagcatccaggttttgaagatttttttattgccgttgacccgcaaaccgatctcagcgccgtcactcgcccgcgtgcgttaccgttattaacgccattccagatgcgcgatcatagtacgcgccatttatggaccacctttagtgacgatcaaattgacctgaattaccgtagccctgaagtgttgctggcgatggtggatgttttactctgttaccttgcgaaaggtgctgagtatgtccgcctggatgccgttggctttatgtggaaagagccgggaacaagctgcatccatctggaaaaaacacatctgattatcaaactgttacggagcattattgataacgttgcgccaggtacagtgatcattaccgagaccaatgttccgcataaagacaacattgcttactttggcgcaggcgatgacgaagcacatatggtgtaccagttcagcctgccgccactggtgctgcatgcggtgcaaaaacagaacgttgaggcgctttgtgcgtgggcgcaaaacctgacactaccttccagcaacaccacctggtttaacttcctcgcctctcacgatggcatcgggctaaacccgctacggggcttgttgcctgaaagcgaaatattagagctggtcgaggcgttacagcaggaaggtgcattagtaaactggaaaaataatcccgacggtacacgcagtccgtatgaaataaatgtgacctatatggatgcgttaagccgccgtgagagtagcgatgaagaacgttgcgccaggtttatccttgcccatgcgattttgttaagtttccccggtgtgccagcgatatatattcaaagtattcttggcagccgtaatgattacgcaggtgtcgaaaaactcggatataaccgtgcgattaaccgtaaaaaatatcacagtaaagagataacccgagaactgaacgatgaagctacattaaggcatgcggtatatcatgagttgagccgtttaattacacttcgtcgcagccataacgagtttcatccggataataattttaccattgatacgattaatagttccgtaatgcgtattccaagaagtaacgctgatggtaattgtctgactggattgtttaatgtcagtaaaaatattcagcatgtaaatattactaatctgcatggtcgggatctgattagtgaagttgatatattgggtaatgaaataacgctgcgcccctggcaggttatgtggattaaataaaaaggaacatctcatgattaaaagtaaaatcgtgctgttaagtgcactggttagttgcgccctgattagtggctgtaaagaagaaaataaaacgaatgtatccatcgaatttatgcattctagcgtggagcaggagcgccaggccgttatcagtaaattgattgcccgttttgaaaaagaaaaccctggcatcaccgttaagcaagtgcccgtggaagaagatgcctataacactaaagtcattactcttagtcgtagcggtagcctgccggaagtgatcgaaaccagccatgactacgccaaagtgatggacaaagagcagcttatcgatcgcaaagcggttgccacagtcatcagcaacgttggtgaaggcgcgttttacgatggcgtactgcgtattgtgcgtaccgaagatggtagcgcatggaccggtgttcctgtcagcgcctggattggcggtatctggtatcgcaaagatgtgctggcaaaagcggggcttgaggagccgaaaaactggcaacagctgctggacgttgcacagaaactgaatgacccggcgaataaaaaatacggcattgcgctgcctacagcagaaagcgtgttgacggaacaatccttctcccagtttgcgttatccaaccaggctaacgtctttaacgccgaaggcaaaatcacccttgatacaccagagatgatgcaggcactgacctattaccgcgaccttactgccaacactatgccgggttctaacgacatcatggaagtgaaagacgcctttatgaacggcaccgcgccgatggcgatttactccacctatatccttccggctgtgattaaagaaggcgacccgaaaaacgtcggtttcgtggtgccaaccgagaaaaactctgcggtctacggcatgttgaccagcctgaccattaccgccgggcaaaagaccgaagagacggaagcagcagaaaaatttgtcacctttatggagcaggcagacaacattgccgactgggtgatgatgagcccaggtgctgcgctgccggtgaataaagcggtggtgactaccgccacctggaaagacaacgacgttattaaggcgctgggtgaactaccgaatcagctaatcggtgaactgccaaatattcaggtttttggcgcagtaggggataaaaactttacccgcatgggtgatgtgacgggttctggcgtggtgagtagtatggtgcataacgtcaccgtgggtaaagccgatctctctactacgctgcaagcgagccagaaaaaactggatgaactgatcgaacagcactaaacccaggacaggaatccgcaatgaacaggctttttagtggtcgttccgatatgccctttgcgctgctgcttctcgcgcccagcttattactgctgggcggtctggtggcgtggccgatggtgagcaatatcgaaatcagttttttacgtctgccgctcaatcccaacatcgagagtacgtttgttggggtgagcaactatgtgcgtatcctctccgatcccggcttctggcatagcctgtggatgacggtctggtataccgcgctggtggtggcgggcagcaccgtgctcgggctggcggtggcgatgtttttcaaccgcgagttccgcctgcgcaaaaccgcgcgtagcctggtgatcctctcctacgtaacgccgtccattagcctggtgttcgcctggaaatacatgttcaacaacggctacggcattgttaactacctcggcgtcgatcttctgcatctctatgagcaggcaccgctgtggttcgataatccgggcagtagctttgtgctggtggtgctgttcgccatctggcgctacttcccgtatgcctttatcagctttctggcgattttgcagaccatcgacaaaagcctgtacgaagcggcagagatggatggcgctaatgcctggcaacggtttcgtatcgtcacgctgcccgcaattatgccggtcctggcgacggtggtgacactgcgcaccatctggatgttctacatgttcgcggatgtttatttgctgacgaccaaggtcgatattctcggtgtatatctctacaaaaccgcctttgcctttaatgatttaggaaaagcggcggcgatcagcgtggtgctcttcatcattattttcgctgtcattctgctgaccaggaaacgggtgaacctcaatggcaacaaataaacgcacactcagtcgcatcggtttttactgcgggctggcgctgtttctcatcatcacgctgtttccattttttgtgatgctgatgaccagcttcaagggcgcgaaagaggcgatcagtctgcatcctacgctgctgccgcagcagtggacgctggagcattacgtcgacatttttaacccgatgattttcccgtttgtcgactacttccgtaacagtctggtggtgtctgtggttagttccgtggtggcggtattcctcggcattcttggggcttacgcgctttcccgcctgcgctttaaaggtcggatgaccatcaacgccagcttttacacggtgtatatgttctctggcattttgctggtggtgccgcttttcaaaatcatcaccgcgcttggcatttacgacactgagatggcgctgatcatcaccatggtgacgcaaactctgcccaccgccgtgtttatgctgaaaagctacttcgacaccatccccgatgagatcgaagaagcggcgatgatggatggcctcaaccgtctgcaaattatcttccgcatcaccgtgccgttggcgatgtccgggctgatatccgtgttcgtctactgctttatggtggcgtggaacgactatctgtttgcgagcattttcctctccagcgccagcaatttcaccttaccggtgggcctgaacgcgctgttcagtacgccagattacatctggggacggatgatggcggccagtctggtgaccgcattgccggtggtgattatgtatgcgcttagcgaacgttttattaagagtggtttgaccgccggtggcgtgaagggctaaagcggccagtttctttacaaggagttttaaatgaaaaagttagtagccacagcaccgcgtgttgctgcgctggttgagtatgaagatcgggcgattttagctaatgaagtgaagatccgcgtgcgtttcggcgcaccgaaacacggaacggaagtggtcgacttccgcgccgccagcccgtttattgatgaagactttaacggcgaatggcagatgttcactccgcgtccggcagatgcgccgcgcggcattgagtttggcaaattccagcttggcaacatggtggttggcgacattatcgagtgcggcagcgacgttaccgactacgcggtgggcgacagcgtatgcggctacggcccgctctccgagacggtcatcattaacgcagtgaataactacaagctgcgcaaaatgccgcaaggcagctcctggaaaaacgccgtctgctacgacccggcgcagtttgccatgagcggcgtgcgcgatgccaacgtgcgcgtaggggattttgtggtggtggtagggcttggcgcaatcggtcaaattgccatccaactggctaaacgcgctggcgcttctgtggtgattggcgtcgatcctatcgcccatcgctgtgatattgcccgtcgccacggcgcggatttctgccttaaccccatcggcactgatgtaggtaaagagatcaaaacgctgaccggcaagcagggtgccgatgtgattatcgaaaccagcggctacgccgacgcgctgcaaagcgcgctccgcggtctggcttatggcggcaccatctcctatgtcgcgtttgccaagccgtttgccgaaggttttaacctcggacgcgaagcgcatttcaataacgccaaaattgtcttctctcgcgcgtgcagcgaaccgaacccggattatccgcgctggagccgcaagcgtattgaagaaacctgttgggaactgctgatgaacggttatctcaattgcgaagatttaatcgacccggtggtgacctttgccaatagcccggaaagctatatgcagtatgtcgaccagcatccggaacagagcatcaaaatgggcgttacgttttaattcaaaggaatgaaaaaaatgaaaatcggcacacagaatcaggcgttctttccggaaaacattctggagaaatttcgttatatcaaagagatgggcttcgatggttttgagattgacggcaaactgctggttaacaacatcgaagaagtcaaagcggcgatcaaagaaaccggtttaccggtgaccaccgcctgcggtggctatgacggatggattggcgactttatcgaagagcgtcgtcttaatggcttaaagcagatcgagcgcattctcgaagcgctggcagaagtgggcggtaaaggcatcgtcgttccggctgcgtggggcatgtttaccttccgcttaccgccgatgaccagcccgcgtagcctggacggcgaccgcaaaatggtgagtgattccctgcgcgtactggaacaggtcgccgcgcgtaccggaaccgtggtgtatctcgaaccgttaaaccgctatcaggatcatatgatcaacaccctcgccgatgcccgccgttacatcgtcgaaaacgatcttaaacatgtacagattatcggcgatttctatcacatgaatatcgaagaagataacctggcgcaggcgctgcatgacaaccgcgacctgctcggtcatgtgcatattgcggataaccatcgctaccagccgggcagcggcaccctggatttccacgcgctgtttgaacagctgcgcgcggataactatcagggctatgtagtgtacgaagggcgtatccgggcggaagatcctgcccaggcgtaccgtgatagcttggcctggttgcgtacctgctaagaggtctttgtgaaaagtgcaatgacaagctctccgctgcgggtcgcgataataggcgcaggccaggtggcggataaggttcatgctagctactactgcacccgcaacgatctggaactggtggctgtctgtgacagccgcctttcccaggcgcaggcgctggcagaaaaatacgggaatgcatccgtgtgggacgatccgcaggccatgctgctggcggtgaaacctgatgtggttagcgtctgcagtcctaaccgttttcattacgaacataccctgatggcactggaagcgggctgccatgtgatgtgcgaaaaaccgcccgccatgacgccagaacaggcgcgggaaatgtgcgataccgcgcgcaaactgggcaaggtgctggcctacgactttcaccatcgttttgcgctcgatacgcaacagctgcgtgaacaggtgaccaacggcgttttgggagagatttacgttaccaccgcccgcgccctgcgtcgctgcggcgttcccggctggggtgtctttaccaataaagaactgcagggtggtggcccgctgatcgacatcggcattcatatgctggatgctgcgatgtatgtgctgggctttccggcggtgaaaagcgtgaatgcgcatagctttcaaaagatcggcacgcaaaagagctgtggtcaatttggtgagtgggatccggcaacttacagcgtcgaagatagcctgtttggcaccattgaatttcataacggcggcattctgtggctggaaacgagttttgcactcaacatccgcgaacagagcattatgaacgtcagcttttgtggtgataaagctggtgcgacgctgtttccagcacatatctacaccgataacaacggtgaattaatgacgctgatgcaacgggaaatagcagacgacaaccgccatttgcgcagcatggaagcctttatcaatcacgtacagggcaagcccgtgatgatagccgacgccgagcaggggtacatcatccagcaactggtggcggcgttgtatcaatccgcagaaacagggacgcgtgtggaattatgaccaggccagtaacgttaagtgaaccccatttcagccagcataccctgaacaagtatgcaagcctgatggcgcaggggaacggctatcttgggcttcgcgccagccatgaagaagattacacgcgccagacgcgagggatgtatctggcggggctgtatcatcgggcgggaaaaggtgaaatcaacgaactggtgaacctgcctgatgtcgtggggatggagattgccataaatggtgaggttttcagcttatcccacgaagcctggcagcgtgagcttgactttgccagtggcgaattacgccgcaatgttgtctggcgtaccagcaacggcagtggttacaccatcgccagccgtcgctttgttagcgcagaccaactgccgctcattgcgctggaaatcactattacgccactggacgccgacgcgagtgtgctgattagtacaggcattgacgccacgcaaaccaatcacggtcgccaacatctcgacgaaacccaggtgcgggtgtttggtcagcatctgatgcaggggagctacaccacccaggatggacgcagtgatgtggccatcagctgttgctgtaaggtgagcggtgatgtgcagcaatgctataccgccaaagagcgccgtttactgcaacataccagtgcgcagcttcatgcaggcgagacaatgacgttgcaaaaactggtgtggatcgactggcgggatgacaggcaagctgctttagacgagtggggcagcgcgagccttcgccagcttgaaatgtgcgcgcagcagagttacgaccaacttcttgcagcaagtacagaaaactggcgtcaatggtggcagaaacgtcgtatcacggtaaatggcggcgaagcgcacgatcagcaagcgttagattatgcgctttatcatctgcgcatcatgacgcctgcccacgacgagcgcagcagcattgcggcaaaaggcttaaccggcgaaggctacaaaggccacgttttctgggatacagaagtatttttgttaccgtttcatctgtttagcgatccgacggttgcccgaagtttactgcgttatcgctggcacaacttgccaggcgcgcaggagaaagcgcgacgcaacggctggcagggcgcgctatttccgtgggaaagcgcgcgcagcggcgaagaagagacgccggaatttgccgccattaacattcgcaccgggctgcggcaaaaagtggccagcgcgcaggcggaacatcatctggtggccgatatcgcctgggcggttattcaatactggcagaccacgggggatgaaagtttcattgcgcatgaaggcatggcgctacttctggagacggcaaagttctggattagccgcgcggtgagagttaacgatcgtctggaaattcatgatgttattgggccagacgaatataccgaacatgtcaataataatgcatacaccagctatatggcccgctacaacgttcaacaggcgctgaatattgcccgccagttcggctgtagcgacgatgcgtttatccatcgcgccgaaatgttcctcaaagagctatggatgccagaaattcagcccgacggcgttttgccgcaggatgatagctttatggctaagccggcgattaatctggcgaaatacaaagcggcggcggggaagcaaaccatactgctggattatagtcgcgcagaagtgaacgagatgcagatcctcaaacaagctgatgtggtgatgctcaattacatgctgccggagcagttcagtgcggcaagctgtcttgccaatctgcaattttatgaaccgcgcactattcacgacagcagtttaagtaaagcaatccacggcattgttgccgcacgctgtggcctgctgacccaaagttatcagttctggcgcgaggggactgaaatcgatcttggtgctgatccgcatagttgtgatgatggtatccatgctgccgcaactggcgctatctggctgggggcgattcagggttttgccggggtgagcgtgcgtgacggtgaattgcatctcaatccggcgttacctgagcagtggcaacagttgtctttccctctgttctggcagggctgcgaattacaggtcactcttgacgcgcagcgtattgcgattcgaacttctgcgcccgttagtctgcgtttgaacggtcagcttataaccgtggctgaagaatctgttttctgtttgggtgattttattttgcccttcaatgggaccgctaccaaacatcaggaggatgaatgaaactgcaaggggtaattttcgatctggatggtgtaatcaccgataccgcgcatctgcatttccaggcgtggcagcagattgccgctgaaattggcatcagcattgatgcgcagtttaacgaatccctaaaagggatcagccgcgatgagtctctgcggcgcattctgcaacacggggcaaagagggcgactttaacagccaggagagggcgcaactggcgtatcgcaaaaatctgctctatgtccacagtctacgcgagttgacggtcaacgctgttctacccggcattcgctctttgctggcagatctccgtgcacagcagatcagcgttgggctggcttctgtctccctgaatgcgccgacgattttagcggcgctggagctgcgcgagtttttcaccttctgcgcggatgcttcccaacttaaaaacagcaaaccggacccggaaatctttctcgccgcctgtgcagggctgggcgtgccgccgcaggcatgtatcggcattgaagatgcgcaggcgggcattgacgccattaacgccagcggtatgcgcagcgtggggatcggcgcgggcttaaccggggcgcaattactgttgcctagtacggaaagtctcacctggccgcggttaagcgccttctggcaaaacgtataacaaaggaatcaacatggctcagcttagcttacaacatattcaaaaaatctacgataaccaggtgcatgtggtgaaggacttcaacctggaaattgccgataaagagttcatcgtgtttgtcggcccgagcggctgcggtaagagcaccaccctgcgcatgattgccgggcttgaggagatcagcggcggcgatctgttgatcgacggcaaacgaatgaatgacgttccagccaaagcacgcaatatagcgatggtgttccagaactacgcgttgtatccgcatatgacggtttacgacaacatggcgtttggtctgaagatgcaaaaaatcgccaaagaggtgattgatgagcgggtgaactgggcggcgcaaattctcggcctgcgtgagtacctgaaacgtaagccgggggcgctttccggcgggcaacgtcagcgagtggcgcttgggcgggcgattgtacgcgaagcgggcgtgtttttaatggatgaaccgctctctaaccttgatgccaagctgcgcgtgcaaatgcgcgcagagatcagcaagctgcatcagaaactgaacaccaccatgatctacgtgacccacgatcagaccgaagcgatgaccatggcgacgcggattgtgattatgaaagacgggattgttcagcaagtaggtgcgccgaaaaccgtttataaccaacccgcgaatatgtttgtttccggatttattggaagtccagcgatgaattttattcgcggcacgatcgatggcgataaattcgttacggaaacgcttaaattaaccattcccgaagagaaattagcggttctgaaaacacaggaaagtttgcataagcccatcgtgatgggaatacgaccggaagatattcatccggacgcgcaagaggaaaataacatttccgccaaaattagcgtggcagaattaaccggtgcggaatttatgctctacaccacggttgggggcacgagttaaacggttgggggcacgagttagtggtccgtgctggtgcgttaaatgattatcatgcaggagaaaatatcactattcattttgatatgacgaaatgtcatttctttgatgcagaaacggaaatagcaattcgctaaatacagggggaaggcattcccccaggataatacaaggaacaataatgaaaaagttattaccctgtaccgcactggtgatgtgtgcgggaatggcctgcgcacaggccgaggaaaggaacgactggcactttaatatcggcgcgatgtacgaaatagaaaacgtcgagggttatggcgaagatatggatgggctggcggagcctagtgtctattttaatgccgccaacgggccgtggagaattgctctggcctattatcaggaagggccggtagattatagcgcgggtaaacgtggaacgtggtttgatcgcccggagctggaggtgcattatcagttcctcgaaaacgatgatttcagtttcggcctgaccggcggtttccgtaattatggttatcactacgttgatgaaccgggtaaagacacggcgaatatgcagcgctggaaaatcgcgccagactgggatgtgaaactgactgacgatttacgtttcaacggttggttgagcatgtataaatttgccaacgatctgaacactaccggttacgctgatacccgtgtcgaaacggaaacaggtctgcaatataccttcaacgaaacggttgccttgcgagtgaactattatctcgagcgcggcttcaatatggacgacagtcgcaataacggtgagttttccacgcaagaaattcgcgcctatttgccgctgacgctcggcaaccacagcgtgacgccgtatacgcgcattgggctggatcgctggagtaactgggactggcaggatgatattgaacgtgaaggccatgattttaaccgtgtaggtttattttacggttatgatttccagaacggactttccgttagcctggaatacgcgtttgagtggcaggatcacgacgaaggcgacagtgataaattccattatgcaggtgtcggcgtaaattacagcttctgataatgggctaaattgccggatgcggcgcgagtactttatccgatctataaatgtaggccggataagatgcgctagcatcgcatctggcattcaggcaaggtagctggtatttatttcagcgtcatatgcgtggcaacggtaatattctgtggactcggttttccagaaattaagcggaataataactcgcagctttgttgacctaactcctgcgtcggaacatcgatgccgcccggtgcaggcgttaaaataaaactcagcgtttcattgctataacccaccaccgctaactgctgcggaatagcaatatttttctctgctgccgcacgataaatgctcattaatttcaggctgtcagtggcaaacaccgcctcaggcaacggactctggcttaataattgccgtgctgcttttaatgcagtttcatgggtataaccgccatcaacaatccattcatcacgcactgcaatattatgcgcagccaggctctgcttataaccattaacgcgatcaacgctaacatggacatcaagcggagcatgcaggcaggcaatattttgatgcccactttcaattaatgcatcggtcaacgcaatgctgtcgccaaaattatcggtatcgacagaataaacatgggcatattgaccttcaactttgccaatcaccaccaccggaatatcatatttatcgagttgggcaaaaaaactctcatccgctgggctactgagcataataatgcctttaatcattttctgcttaattttgctttcgcatttttgcagatcttctgccggattgtggctcgtttgtaatatcacgtcgaaaccttcttcttcagctttggcggtgatggcatgcaaaacttcagagaaaaacggattacccgccgtagttttggtgctacgggtagaaatcaccataatggcatcaaaaccgctagaggtcagcgcgcgggccagcttgtttggctgatactgtaattcttcaatggcccgtaacactttttcgcgcgcttccggggagatattagtttgcttattcagcacgcgacttacggtggatttacttacgcctgcaaccctggcaatatcataaatagtaggggacataggtcaggaactccgtccgaacgtgaatgctgcacatcttatggagttcgccggtcgatgacaacacgggcagttgataatcaatggcctggcccccacattcatatccttacgaatgattttttttctggtcttcagagcagcacaggacagcaatgaagcgacttaaaaatgaactcaatgcgctggtgaatcggggtgtcgacagacatctgcgcctcgctgtaaccggacttagccgcagcggcaaaacagcgtttatcaccgcgatggttaatcagttgcttaatattcacgccggagcacgtttgccgctgttaagtgcggtgcgtgaagagcgcctgctgggcgtgaaacgcattccccagcgtgactttggcattccgcgcttcacctatgacgaagggctggcgcagttatatggcgatccacccgcctggccaacgccaacgcgcggcgtcagtgaaatccgcctggcgctacgttttaaaagcaatgatagcctgctacgccactttaaggatacctccacgctgtatctggaaattgtggattatcccggcgaatggttgctcgacctgccgatgctggcgcaggactatttaagctggagccgccagatgacgggcttactcaatggtcagcgcggagaatggagcgcgaaatggcgaatgatgagcgaagggctggacccgctagcgcctgccgacgaaaaccggctggcggacattgccgccgcgtggaccgattatctccaccactgtaaagagcaggggctgcactttattcagcctgggcgctttgtcttgccgggagatatggcaggtgcgcccgcgctgcaattcttcccgtggccggatgtcgatacctggggcgagtccaaactggcgcaggccgataagcataccaatgccggaatgctgcgcgagcgctttaattattactgcgagaaggtggtgaaggggttctataagaatcattttctgcgctttgaccgccagattgtgctggtggattgcctgcaacctctcaacagtgggccacaggcatttaatgatatgcgtctggcactgacgcagctgatgcaaagttttcactacgggcagcgtaccctgttccggcgtttgtttagcccggttatcgataagctattgtttgctgccactaaagcggaccatgtgaccatcgatcagcacgctaatatggttagtttactgcaacaactgattcaggatgcctggcaaaatgcggcgttcgaagggatcagcatggactgcctggggctggcgagtgttcaggcgaccaccagcggcattattgatgttaacggtgagaaaatcccggcgctgcgtggtaatcgacttagcgatggcgcaccgctcactgtttatcctggcgaagttcccgcacgtttgcctggtcaggcgttctgggataagcaaggcttccagtttgaggcatttcgtccgcaggtgatggatgtcgacaaaccactaccgcatattcgtcttgatgctgcgctggaatttttaataggagataaattgcgatgaccgaaccgttaaaaccacgtattgatttcgacggtcctctggaggtcgatcagaatcctaaattcagggcgcagcagacctttgacgaaaatcaggcgcaaaattttgccccggccacgctcgacgaagcgcaggaagaagaggggcaagtcgaagcggtaatggacgcagcgttacgtccgaaacgcagcctgtggcgcaaaatggtgatgggagggctggctctgtttggcgcaagcgttgtcgggcagggtgtacagtggacaatgaatgcctggcaaacccaggactgggtggcgctgggtggatgtgccgctggggcattgattatcggcgctggcgtaggttctgtggtaacagagtggcggcgcttatggcgcttgcgacagcgcgcccatgaacgcgacgaagcgcgtgatttattgcatagccacggcacgggcaaaggccgcgcattttgcgaaaaactggcgcagcaggcgggtattgatcagagccatccggcgctgcaacgctggtatgccagtatccatgaaacgcaaaacgaccgtgaagtggtcagcctgtatgcgcatttggtccagccagttttagatgcccaggcgcggcgcgaaatcagccgtagcgcggcggaaagtacgttgatgattgcggtcagcccgctggcgttggtcgatatggcgtttatcgcctggcgcaatctgcgtttaattaatcgcatcgccacgctgtatggcattgaactggggtattacagccgtttgcgtctgtttaagctggtattgctgaatatcgcttttgccggagccagcgaactggtgcgcgaagtggggatggactggatgagccaagatctcgctgctcgtttgtctacccgcgcagctcaggggattggtgcaggacttctgacggcacgactcgggattaaagctatggagctttgccgcccgctgccgtggattgacgatgacaaacctcgcctcggggatttccgtcgtcagcttatcggtcaggtgaaagaaacgctgcaaaaaggcaaaacgcccagcgaaaaataatgcaatatcgggtgctgaccggatatctttacgccgaagtgcccgtttttccgtctttgtgtcaatgattgttgacagaaaccttcctgctatccaaatagtgtcatatcatcatattaattgttcttttttcaggtgaaggttcccatgcgtctggaagtcttttgtgaagaccgactcggtctgacccgcgaattactcgatctactcgtgctaagaggcattgatttacgcggtattgagattgatcccattgggcgaatctacctcaattttgctgaactggagtttgagagtttcagcagtctgatggccgaaatacgccgtattgcgggtgttaccgatgtgcgtactgtcccgtggatgccttccgaacgtgagcatctggcgttgagcgcgttactggaggcgttgcctgaacctgtgctctctgtcgatatgaaaagcaaagtggatatggcgaacccggcgagctgtcagctttttgggcaaaaattggatcgcctgcgcaaccataccgccgcacaattgattaacggctttaattttttacgttggctggaaagcgaaccgcaagatagccataacgagcatgtcgttattaatgggcagaatttcctgatggagattacgcctgtttatcttcaggatgaaaatgatcaacacgtcctgaccggtgcggtggtgatgttgcgaagtacgattcgtatgggccgccagttgcaaaatgtcgccgcccaggacgtcagcgccttcagtcaaattgtcgccgtcagcccgaaaatgaagcatgttgtcgaacaggcgcagaaactggcgatgctaagcgcgccgctgctgattacgggtgacacaggtacaggtaaagatctctttgcctacgcctgccatcaggcaagccccagagcgggcaaaccttacctggcgctgaactgtgcgtctataccggaagatgcggtcgagagtgaactgtttggtcatgctccggaagggaagaaaggattctttgagcaggcgaacggtggtagcgtgctgttggatgaaataggggaaatgagtccacggatgcaggcgaaattactgcgtttccttaatgatggcactttccgtcgggttggcgaagaccatgaggtgcatgtcgatgtgcgggtgatttgcgctacgcagaagaatctggtcgaactggtgcaaaaaggcatgttccgtgaagatctctattatcgtctgaacgtgttgacgctcaatctgccgccgctacgtgactgtccgcaggacatcatgccgttaactgagctgttcgtcgcccgctttgccgacgagcagggcgtgccgcgtccgaaactggccgctgacctgaatactgtacttacgcgttatgcgtggccgggaaatgtgcggcagttaaagaacgctatctatcgcgcactgacacaactggacggttatgagctgcgtccacaggatattttgttgccggattatgacgccgcaacggtagccgtgggcgaagatgcgatggaaggtagcctggacgaaatcaccagccgttttgaacgcagcgtattaacccagctttatcgcaattatcccagcacgcgcaaactggcaaaacgtctcggcgttagtcataccgcgattgccaataagttgcgggaatatggtctgagtcagaagaagaacgaagagtaagcgcgaatatgcctgatggtgcaacaccatcaggcatattaaattatgctttcagtacagccagagctgcttcgtaatccggctcggtggtgatttcatccaccagctggctgaaaatcacattgtcattttcgtcaataaccacaacggcacgcgctgccagacctttcagtgggccatcagcaattgccacaccgtaagcttgcagaaattcagcgttacggaaagtggagagggtgataacgttgttcagaccttctgcgccgcagaaacgagactgggcgaacggcagatcggcagagatacacagcacaacggtgttgtcgatctcagttgccagttggttaaacttacgtacacttgcggcgcaaacaccggtatcaatactcgggaaaatgttcagcactttgcgtttacccgcaaactgaccgagggtgacgtcagacagatcttttgccacgagagtaaaagtctgcgctttgctacccgcctgcgggatggaattggcgactgtaaccgggttgccctggaaatgaacggtttgactcatgattatctttcctgtttacatatagttaacgtcacacctagtttatgctaactgtcaataacacagcaaacgctattacagggtctccttacaacaactgtcaacgcagtttgtaattaaaagattaacccatatctggtgaatgaaacagtgatgaaccttctgccagatcaataaatcagaaaaatttaatgatatgacagaaggatagtgagttatgcggaaaaatcaggcaacgttacgcgtatgaccggcaagctgggccagcgcatcgttattttcgatggtgatgtatttacctttgactgccagcatgccgcttttctggaagcgacccagcagacggctgatggtttctaccgtcaggcccagatagttaccgatatcgccacgagtcatcgtcaggcggaattcacgaggggagaagccgcgttgggcaaaacgacgggacaggttgtagatgaatgcagccagacgttcctcggcatttttcttgctcaacagcaggatcatgtcctgatcgcctttgatttcaccgctcatcagacgcatcatctgctgacgcagattcggcattttaccggacaaatcgtccagcgtttcgaacgggatttcacataccatgctggtttccagcgcctgcgcgaagctcgggtgatggccgctgccgatggcgtcaaatcccaccaggtcgcctgctaaatggaaaccagtgatttgctcgtcgccttgctcagtgatggtataacttttaatcgtaccggagcggatggcataaaggcttttaagttcatcaccagccttaaacagcgtctggcctttctgaataggcttcttccgctcaatgatattatcaagctgatcaagctcatgttcgttgagtgtgaacgggatgcaaagctggctgatgctgcaatcctggcaatggatagcacaaccgccagactgaatgcgccgtataattcgcttttccgggatcataggtctgctcaagccgtaattgatatttgtcaattttaacatctttttagggagcaagtaagtctaagcaaaccttaacagcagagaattccgatattagatgtaaatatatgtctatctatttgaaaacccttaagttgttaagggtaactttacataaaagtgtgaacaagctggcacaaattgtttaatgtttacagcaaaagataaccttcatggcgcaataaccactcttttcgctgaactccgcctgcatatccggtcatggtgccgtttcggccaataacccgatggcaaggtacgacgatgctgatgggattgcttccgtttgccgcaccaacggcacgcgccgcgccaggacggcccaattgctcagccagttggccgtaatgcattacctgcccgcaggggatagtgcgtagtgttttccagacttcgcgctgaaatggcgtcccccccgtagcagtgggaagcgtatcaataatgctaagattaccggcaaaatattcacgaagcttgtcgcttaaaccgcctggattggtggcagaaatgcgctcatagccttctttgcgataatggatgtccagcagctgcaccatgcgttcgctgtactcttcccattcaaccgcccgcaggcgaaattgctcatcgcaaatcacccacagtggacccagtggcgtggcaattttttcttcaagtaatctcagcatccgttctctcttaagacaaacgtgggtaaatacccggacctatcggcagaccgacaagataccacgccagcacatcgcagccatactatgcagaaacaatgctgtcgatggctgcttttgcgtcagactgtgctttcgctgccatttccggaccgtatgcgatcccttcggcgaagacaaatttcacatcggtaatgccgataaagccgaggaacgtggacagatacggcgtcaccaggtccgttggtccatctttgtggatcccgccgcggctggtaataacgatggcttttttacccgttaccagaccttccggaccgttctcggtatagcggaaagtaacgcctgcgcgggcaaccaggtcaaaatagtttttcaactgagtcgagatgttgaagttatacatcggtgccgcaataacgataacgtcgtgggctttcagctcggcaatcaactcatcggaaagtgccagagcttcctgctgacgcggagtcagcggcgcatcgctcggacgcagagcgccaaccagttcgccatccagtaccggaatcggatttgcagccaggtcgcgaacggtgatttcatcagcggagtgcttttcgcgccattgttcaacaaaataatcggacaactgattagactgagagtaccctgccaggatgctggatttaagaactaataccttgctcatggtgtttccttatagatgtttgaatgggcgatgccccgttgcttgttgacactttattcacaatcctgccacagagatagcgcaataaatcgaagcctatgttcgaatttattgaacaacgcatagaaagccgcgatgtggtactctatatctatcatttaaaagaaaattaatcaggcagactactgcccactaacgttatgacagaacaacaaaaattgacctttacggccttgcagcagcggctggattcgctgatgctgcgtgacagactgcgtttttctcgccgtctgcacggcgtgaagaaggttaaaaatcctgatgcacaacaggccattttccaggagatggcgaaagagattgaccaggcggcagggaaagtcctgctgcgtgaagcggcacgaccggaaattacttatcctgacaatttaccggttagtcagaaaaaacaggacattctcgaagcgattcgtgatcaccaggtggtgatcgtcgccggggaaacgggttctggtaaaacgactcagttaccgaaaatctgtatggagctggggcgcgggattaaaggactgatcggccatacccagccgcgtcgtctggcggcaagaacagtggcgagccgtattgcggaagagctgaaaacggagccgggcggttgcatcggttacaaagtgcgtttcagcgatcacgtaagtgataacacgatggtcaagctgatgaccgacggtatcctgctggcggagatccagcaagaccgcctgctgatgcagtacgacactatcattattgacgaagcgcacgaacgcagcctgaatatcgattttttgctcggctatttgaaagagttgctgccgcggcgtcctgacctaaaaatcattatcacttccgcgactatcgacccggaacgctttagccgccactttaataatgcgccgattattgaagtctccggtcggacctatccggtggaagtgcgctatcgcccgattgttgaagaagccgatgacaccgagcgcgatcagttgcaggcgatttttgacgccgtagacgaactgagtcaggaaagccatggcgacattctgatctttatgagcggcgagcgggaaatccgcgataccgccgatgcgctgaacaagctgaacttacgccataccgaaatcttgccgctttatgcgcggcttagcaacagcgaacaaaatagggtattccagagccacagcggacggcgcattgtgctggcgaccaacgtcgcggaaacgagcctgaccgtaccggggattaaatacgttatcgaccccggtacagcgcgtatcagccgctacagctatcgcaccaaagtgcagcgtttgccgattgagccgatttcccaggcgtctgccaatcagcgtaaaggccgctgtggtcgtgtgtccgaagggatctgtattcgtctctattccgaagacgatttcctcagccgcccggagtttaccgatccggagattctgcgtaccaacctggccagcgttattttgcagatgaccgcgctggggctgggcgatatcgctgcgttcccgtttgtcgaagcaccggataaacgcaatatccaggatggcgtgcgtctgctcgaagagctgggcgcgatcaccactgatgaacaggccagcgcctataaactgacgccgctcggtcgccagctcagccagttgcctgtcgacccacgtctggcgcgtatggtgctggaagcgcaaaaacatggctgcgtgcgtgaggcgatgattatcacgtccgcgctctccattcaggatccgcgcgaacgtccgatggacaaacagcaggcaagcgacgaaaaacatcgtcgcttccacgacaaagagtctgactttctcgcgtttgtgaatctgtggaattatcttggcgagcagcaaaaggcgctttcttccaacgccttccgtcgcctgtgtcgtaccgattatctcaactatctgcgcgtgcgcgaatggcaggatatctacacccagttgcgtcaggtggtgaaagaacttggcattccggttaacagcgaaccggcggagtatcgcgaaattcacattgcgttgctgaccggtttactttcccatatcggcatgaaagatgccgataaacaagaatataccggcgcacgtaacgcgcgtttctccatcttccccggttctggtttattcaaaaaaccgcctaaatgggtaatggtggcggaactggtagaaaccagccgcctgtgggggcgcattgctgcgcgtatcgacccggaatgggtggagccagttgctcagcatttgattaaacgcacctacagcgaaccgcactgggaacgggcgcagggcgcggtgatggcaacggaaaaagtcactgtttatggtttgccgattgttgccgcgcgcaaggtcaactacagccagatcgatccggcgttatgtcgtgaactctttattcgccacgcgctggtggaaggtgactggcagacgcgtcacgcattcttccgtgaaaacctgaaactacgggcggaagtagaagagctggaacacaaaagtcgtcgccgcgatattctggttgatgacgaaacgttgtttgagttctacgaccagcgcatcagccacgatgtaatctccgctcgccacttcgacagctggtggaaaaaagtcagccgcgaaacgcctgatttgctcaactttgaaaaaagcatgttgatcaaagagggcgcagaaaaaatcagcaagctggattacccgaacttctggcatcagggcaatctcaagctgcgtttgagctatcagtttgagcccggcgcggatgctgacggtgtgaccgtacatattccgctgccgttacttaaccaggttgaggaaagcgggtttgaatggcagatccccggtctgcgccgcgaactggtgattgctctgattaaaagcttgccgaaaccggtacgccgtaattttgtacccgcgccaaactatgccgaagcgtttttaggccgcgtcaaaccgctggagttaccgttgctcgacagccttgagcgcgagttacggcggatgaccggcgttaccgttgaccgcgaagactggcactgggatcaggtgcccgatcacctgaaaattaccttccgcgtggtggatgacaaaaacaagaagctaaaagaagggcgcagcctacaagatctgaaagatgcgctgaaaggcaaagtgcaggaaacgctatctgcggtggcggatgacggtatcgagcagagcggcttacatatctggagttttggtcagctgccggaaagctacgaacagaagcgtggcaactacaaagtgaaggcgtggccggcgctggtggatgagcgcgacagtgtggcgatcaaactgtttgataacccgctggagcaaaagcaggcaatgtggaacggtcttcgccgtctactgctgctgaatattccaagcccaatcaaatatttacatgaaaagttaccgaacaaagccaagctgggactgtactttaacccgtatggcaaagtgctggagctgatcgacgactgtatctcctgcggtgtggataaattgatcgacgccaatggtggcccggtctggacggaagaaggctttgctgcgctgcatgaaaaagtgcgtgccgaactgaacgacacggtggtggatattgcgaagcaggtcgagcaaatccttacggcagtgttcaatatcaacaaacgtctgaaagggcgggtggatatgaccatggcgctggggctttctgacattaaagcgcagatgggcgggttggtatatcgcggttttgtcactggtaacggcttcaaacggctgggcgacacgctgcgatatttgcaggcgattgaaaaacggctggaaaaactggcggttgatccacatcgcgaccgtgcgcagatgctgaaagtcgaaaacgtccagcaggcgtggcagcaatggatcaacaaactgccgcccgcacgtcgtgaggatgaagacgtgaaagagatccgttggatgatagaagagttgcgcgttagttacttcgctcaacaacttggtacgccttatccgattagtgataagcgtattttgcaggcgatggagcagattagcggttaaccctgctatttgcctgataaagaaaaaacccggtaagcatttagcgccgggttttttattaattctaaaacggtaagggtaaaaattcaggaattcagaaaaatacaattctctgctgcaagatgaataatgtttatctacagcatttccttaaaagatatgtcaggcttgcggagtggcggttaaggacatacgatttcctcctttcagagtgctccgcttctcactattatctcacgcagtattcttaagggaacgataaggaggaaccatgaacattaccccgtttccgacgcttagcccggcaactatagatgccataaatgttatcggacagtggctggcgcaggatgatttctccggtgaggtgccgtatcaggccgattgcgtgatccttgcaggcaatgcggttatgccgactatcgatgcggcatgtaagattgcccgcgatcagcaaattcctttactgattagtggtggtatcggtcacagcacaacttttttgtatagcgccatcgcacagcatccgcactacaacactatccgcaccactggcagagcagaagcgaccatcctggcggatatcgctcatcagttctggcacattccgcatgaaaaaatctggattgaagaccagagtacaaactgcggtgaaaacgcacgctttagcatcgcgctattgaatcaggccgtagaacgagttcatacggctatcgttgttcaggaccccaccatgcagcggcgcacgatggcgacgttccgccgtatgactggggacaatcccgatgcaccacgctggttaagttatcccggattcgttcctcagttaggaaataacgcagacagtgtaatctttattaatcagttacaaggattatggccagttgagcgttatctcagtctactcactggcgagctgccgcgtttacgcgatgatagcgatggctacggtccccgcgggcgagattttatcgttcacgttgattttccggcagaagtcatccatgcatggcaaacgctgaaacatgatgcggtgctcatcgaggcgatggaaagtcgcagcttacgttaaaaattgcccgtttgtgaaccacttgtttgcaaacgggcatgactcctgacttttatttctgccttttattccttttacacttgtttttatgaagcccttcacagaattgtcctttcacgattccgtctctctgatgattgatgttaattaacaatgtattcaccgaaaacaaacatataaatcacaggagtcgcccatgagtgtacccgttcaacatcctatgtatatcgatggacagtttgttacctggcgtggagacgcatggattgatgtggtaaaccctgctacagaggctgtcatttcccgcatacccgatggtcaggccgaggatgcccgtaaggcaatcgatgcagcagaacgtgcacaaccagaatgggaagcgttgcctgctattgaacgcgccagttggttgcgcaaaatctccgccgggatccgcgaacgcgccagtgaaatcagtgcgctgattgttgaagaagggggcaagatccagcagctggctgaagtcgaagtggcttttactgccgactatatcgattacatggcggagtgggcacggcgttacgagggcgagattattcaaagcgatcgtccaggagaaaatattcttttgtttaaacgtgcgcttggtgtgactaccggcattctgccgtggaacttcccgttcttcctcattgcccgcaaaatggctcccgctcttttgaccggtaataccatcgtcattaaacctagtgaatttacgccaaacaatgcgattgcattcgccaaaatcgtcgatgaaataggccttccgcgcggcgtgtttaaccttgtactggggcgtggtgaaaccgttgggcaagaactggcgggtaacccaaaggtcgcaatggtcagtatgacaggcagcgtctctgcaggtgagaagatcatggcgactgcggcgaaaaacatcaccaaagtgtgtctggaattggggggtaaagcaccagctatcgtaatggacgatgccgatcttgaactggcagtcaaagccatcgttgatagtcgcgtcattaatagtgggcaagtgtgtaactgtgcagaacgtgtttatgtacagaaaggcatttatgatcagttcgtcaatcggctgggtgaagcgatgcaggcggttcaatttggtaaccccgctgaacgcaacgacattgcgatggggccgttgattaacgccgcggcgctggaaagggtcgagcaaaaagtggcgcgcgcagtagaagaaggggcgagagtggcgttcggtggcaaagcggtagaggggaaaggatattattatccgccgacattgctgctggatgttcgccaggaaatgagcattatgcatgaggaaacctttggcccggtgctgccagttgtcgcatttgacacgctggaagatgctatcagtatggctaatgacagtgattacggcctgaccagtagtatctatacccaaaatctgaacgtcgcgatgaaagccattaaagggctgaagtttggtgaaacttacatcaaccgtgaaaacttcgaagctatgcaaggcttccacgccggatggcgtaaatccggtattggcggcgcagatggtaaacatggcttgcatgaatatctgcagacccaggtggtttatttacagtcttaatgagtgaaagaggcggaggttttttcctccgcctgtgcgcgtcagagtttagcgaatttttcgagggtgcgaataagctgtgtgacgaagccatattcgttatcgtaccaggcgaccgttttcaccagttgtaaatcgcccacggcggtaatttccgtttgcgtggcatcaaacaccgaaccgaaatggctgccaatgatatcggaagagactatttcttcatcggtataaccaaatgactcgttattggtggttgcttgtttaagtgcgttattcacctcttcggcagtcacttttttccgagaatcgataccagttcagtgaccgaacctgttttcaccggcacgcgttgcgcatgacctttcagtttgccgctcagttccgggatcaccagaccaatggcttttgccgcccccgtagtgtggggaatgatattttctgccgctgcgcgtgaagcacgtaaatctttaccacgcgggccatccaccagtgactgggtgccagtataggcatgaatggtcgtcatcgtgccgacttctatcccgaaactgtcatgcaaggctttggccatcggcgcaagacagttagtggtgcatgacgccacggaaacaatggtgtcgttgccatccagagtgtcgtcattgacgttataaacgatagttttcatttcaccggcaggggcggaaatcaacaccttcttcgcaccagcatcaagatgcgcctgcgatttctcggcggaggtataaaagccagtacattcgacaatgatttctgcacctttcgctttccacggaatatttttagcctctttttcggcgtaaaccgcgatacttttcccatcaacgataagtgaatcttccgtaaaatcaacgctccaggggaatggtccgtagtttgaatcatgtttcagcaggtaggcgagaatttatggggaagtgagatcattaatagcgacaacgtctatgttgcttttgacttcaagtaatcgacccaacaccagtcgaccgatacgaccaaaaccgttaataccaactttactcatggttttctcctgtcaggaacgttcggatgaaaattgatcctttccaagcttagaccaggatggcgggatgggcaatctccattctcacagtgaaacgtaacgtactgaaaacgggtgaacaatatttaatgaaattttgagaaaagcccgttatgttaacggaaaattatgttaaagcaggaaatgttatggaaaataaatatagtaggttacaaatcagcattcactggctggtctttttactggttatcgcagcgtattgcgcaatggagtttcgtggtttcttcccacgtagcgatcggccactcatcaacatgattcatgtttcctgtggcatcagtattctcgtgctgatggtcgttcgtcttttgttaaggctgaaatacccaaccccgccgattatacctaagccaaaaccgatgatgacgggactggcgcatttgggacatttggtgatttatctcctgtttattgcgctgccagtgattggtttggtgatgatgtataaccggggcaacccgtggtttgcgtttggtttgacgatgccttacgctagtgaggccaatttcgaacgggtagatagcttaaagagctggcatgaaacgctggcgaatctgggatattttgttatcgggttgcacgctgcggctgcactggcacaccactatttctggaaggacaacacacttctacgcatgatgccgcgtaaacgttcctgaaggatatttaaagaaaacgcctgtactaaaaccgacccgtggtacaggcgaagaatacgggtctacatcggaagcgcctattatatttatttgtatgataaataaaaccataatccttgcccatacgtccatctggcttatttttaatcaattcacccgatctttgatctcatcaacggtatcaaaataaaccagcgtataacgttcaaatcgaacataagattcgataaaccatggaggttatatgaaaaaactggcacttattttgtttatgggaacgcttgtttccttttatgccgatgccgggcgcaaaccctgttctggtagcaaaggggggatcagtcactgtacggcaggcggcaaatttgtctgtaatgatggttctattagtgcaagcaaaaaaacatgcactaactgaagtgtaaaaggggtgccatgagaaaatgaatctgctagtcaaatgcgcggggaaaatccccgcgcttgcccttacctggacgtgcaggccatgagcgcagcaacctccttatcaccgtcccggaaccgcagttcgtagagcgtttgtcgggtcaggagtgtgaatgtcagaatcgtaatgcagataatgagcagacacaccaccagagggttgtgcttcatagcctttctccttgccggatggcgggtaagaggctaagatctgaattgctaggttcattcgttggcctcggttgatagaaatatcggtcggggccttcgtctttctgattcccggttagcctgaaaacagaaagtctcaggcacccgcaggcatcctatgaggtttccttagggacgaaaataatcacttcacgaaattgcgtgctgttttccagaatttttcgtcattcgggttagccagtttagccattcgttactctcttcattccaatagcattaattttctatgcaataattgttgtaaaaatgtgacgcaaagaggtttttggtcataagtaattaccgtcaagtgccgatgactttctatcaggagtaaacctggacgagagacaacggtaatgaatacaactcccagtcagcgattaggttttttgcatcacatcaggttggttccgttatttgcctgcattctaggcggtatcttagttctattcgcattaagtagtgccctggctggctatttcctctggcaggccgatcgcgatcagcgtgatgttactgcggagattgagattcggaccgggttagcgaacagtagtgattttttgcgtagtgcccggatcaatatgattcaggccggggctgcgagtcgtattgcggaaatggaagcaatgaagcgaaatattgcgcaagccgaaagcgagattaaacagagccagcaaggttatcgtgcttatcagaatcgaccggtgaaaacacctgctgatgaagccctcgacactgaattaaatcaacgctttcaggcttatatcacgggtatgcaacctatgttgaaatatgccaaaaatggcatgtttgaagcgattatcaatcatgaaagtgagcagatccgaccgctggataatgcttataccgatattttgaacaaagccgttaagatacgtagcaccagagccaaccaactggcggaactggcccatcagcgcacccgcctgggtgggatgttcatgattggcgcgtttgtgcttgccctggtcatgacgctgataacatttatggtgctacgtcggatcgtcattcgtccactgcaacatgccgcacaacggattgaaaaaatcgccagtggcgatctgacgatgaatgatgaaccggcgggtcgtaatgaaatcggtcgcttaagtcgtcatttacagcaaatgcagcatagtctggggatgacagtagggactgttcgacagggcgcggaagagatttatcgtggcaccagcgaaattagtgctggcaatgcggacctgagttctcgcaccgaagaacaagcggcggctatcgaacaaactgccgccagcatggagcaactcactgcgacggtgaaacagaatgcggataacgcgcatcatgccagcaaactggcgcaagaggcttctattaaagccagcgatggcgggcagacggtttccggtgtagtaaaaacgatgggcgctatctccacgagtagcaagaaaatttctgagatcaccgccgtcatcaacagtattgctttccagacgaatattctggcactgaatgctgccgttgaagccgcgcgagcgggtgagcaagggcgtggatttgccgttgtcgccagcgaagtacggacactcgcaagtcgcagcgctcaggcggcgaaagagattgaaggcttgatcagtgaaagtgtcaggttaattgacctggggagcgatgaggtggcaacggccgggaaaaccatgagcactattgttgatgccgtcgcgagtgtcacacatatcatgcaggaaatcgccgccgccagcgatgaacaaagtagaggcataacgcaggttagccaggcgatttctgaaatggataaggtgacgcaacagaatgcttctctggtagaagaggccagtgcggcggcggtgtcccttgaagaacaggcggcacgattaactgaggcggtggatgtattccgtctgcacaaacattctgtgagcgcagaacctcgcggagcgggtgaaccagttagtttcgctacggtgtgaaaatgttcaaggagggatcgacagatcccttcacctttcagaacggcatactttttcgaatagcgttaatcatcaactggcaaccagaagagaacgtcgcatctacgcgggtcagtattccaatcggttcgcctgcaccatgtcccggaacaggcagggccaccagcgtggcatgacgcaggtcgtcttttacagcgccagaagggacaaaccacacgtaatcgtattcaaccgtaagttgacgagataggctagcagacagcgtttcgatacaaccgctaggaattttacagccctggctctgcactaatgcatcactatgctggcgtggcgcagtgccttctggacttacaacgaccggccattccagcacccggcttagcgttacgttctcctgaagtagcgggtgattagggcggacaaccagcttcaagctttcaagaaacagcagttcgtaattaagcccggtcatcagttcaggatcactcatccgaccaatgccgatatcgatttccccggtttttaaacccgccagaatcatagggttactcattgtcgcaacttgcaaggtcgtctctttttgttgctgatgaaactgacctataacgctaggtaatatccccagtgccgcagtaggtagtgcaccaaccctgacgacatcattattaagaccttctttacgatgaaggctccgtccggcagtgttgatggcgtcaagaactctgactgcatgcgttaaaaattgttcgccgggtaaggtaagttgcgccccctgacgaccacgctcaaacaagcgagcgccagtcagctgctccagttcattcaatgtcttagagagcgcaggttgactcaaattaagggtttcagccgcgcgccccaaagttccttgttgtgcgacagctacgaatgtatgaaggtggcgcaaacggatgcgctgactaaacagactatttttttccataagcgatgttaaaaacgaagcggtgtcgctgacaagtgaagttgtttgattatgataacttgattgcaaaatattattaacaattaaagcaattatgttacagcaaaatggataatattgatgttttcgcggcgagatcacagtttgtaaattcttcccgcaagagtgaatgcggttacctacactccagattactgaccactggaggcagacactatggcgaacagcatcacggcggatgagattcgggaacagtttagccaggcaatgagtgccatgtaccagcaagaagttccgcaatatggcacgctgctggaactggtagctgatgtgaatctggctgtgctggaaaacaatcctcaactgcacgaaaaaatggtaaatgcagacgagctggcgcgactgaatgttgaacgtcatggggcgattcgcgttgggactgcacaagagcttgctactcttcggcggatgtttgccattatggggatgtacccggtgagctattacgatctcagccaggcaggggtgccggtacatagcacagcatttcggcccattgatgatgcttctctggcgcgtaatcccttccgcgtttttacctccttactccgccttgagcttatcgagaacgaaattttgcgccagaaagcggcggagattctgcgtcagcgcgatatcttcaccccacgttgtcgacaactgttagaggaatatgagcagcagggcggctttaacgaaacacaggcacaggagtttgtgcaggaagccctggaaacgtttcgctggcaccagagtgcaacggtagatgaagaaacctatcgcgcattgcacaacgaacatcggttgattgctgatgtggtctgttttcctggatgccatatcaaccacctgacgccacgtacgctggatattgaccgggtgcagagcatgatgcctgaatgcggaattgaacccaaaattctcatcgaggggccgccgcgccgcgaggtaccgattttactacgccagaccagctttaaagcactggaagagacggtgttgtttgcggggcagaaacagggcacgcataccgcgcgctttggtgaaattgagcagcgtggcgtggcattaacgccgaaagggcgacaactgtatgatgatcttctgcgtaacgctggaaccgggcaggataatctcactcaccaaatgcatttacaggaaaccttccgcacttttcctgacagtgagtttttaatgcgtcagcaagggttggcatggttccggtaccgtctgacgcctagcggtgaggcgcatcgtcaggcgattcatcctggagacgatccacagcccttaattgaacgtggttgggtagtggcgcaacccatcacctatgaagatttcttgcccgttagcgcggcggggatcttccagagtaatctgggtaatgaaacgcagacacgcagtcacggtaatgccagtcgcgaagcatttgagcaggcgttgggttgtccggttttggatgagttccagctttaccaggaagcggaagaacgcagtaaacgtcgctgtggtttgctttaaaatctgaccatccgcctttgcaaaaatttgcctgattttacaaacgaatcaggctcatcccatcgacataaaaaaaatgccgatttatgcatattctctcagttcaacaattggattattaataaatattgtctagagtgagcggtcataaataagcactttcttgccgctgaaaacgaccagcgcgggaccattcacaacaccagaaggactcactttcaggtatggatcgtagacgatttattaaaggttcaatggctatggccgccgtgtgcggtaccagcggcattgcttctcttttttctcaggcggcattcgcggcagattctgatattgccgacgggcaaacccagcgttttgacttctccattctacagagtatggcgcacgacttagcgcaaacagcgtggcgtggtgcgcctcgtccgttacctgacacgctggcgacaatgacgccgcaggcttataacagtattcaatacgacgccgaaaaaagcctctggcataacgttgagaaccgtcaactggacgctcagttcttccatatgggaatgggattccgtcgccgcgttcgtatgttttctgtagatccagcaacacatctggcgcgtgaaattcactttcgcccggagttgttcaaatacaacgatgcaggtgttgatacaaaacaattagaagggcaaagcgatctcggctttgccggttttcgcgtgtttaaagcccccgaactggcgcgccgtgatgtagtaagttttctcggcgcgagttatttccgcgccgttgatgatacatatcaatacggtttgagcgcccgcggcctggcgatcgacacttacaccgacagtaaagaagagttccccgactttaccgccttctggtttgatacggtaaaaccgggggcaactacctttaccgtttatgcgttgctcgatagcgccagcattactggtgcctataagttcactatccattgtgagaaaagtcaggtgattatggatgtggaaaatcacctgtatgcgcgcaaagacattaaacagctgggcattgcgccgatgaccagtatgttcagctgcggtactaatgaacgtcggatgtgcgatacaattcatccgcaaattcatgactctgatcgtctgtccatgtggcggggcaacggcgagtggatttgccgtccgctgaataatccgcaaaaattgcagttcaatgcttacaccgacaacaacccgaaagggtttggtttattgcaactggatcgtgacttctcccattatcaggacattatgggctggtataacaaacgcccaagtctgtgggtggaaccgcgtaacaagtggggtaagggcaccatcggcctgatggaaatcccaacaacgggcgaaacgctggataacattgtctgcttctggcagccagaaaaagctgtaaaagcaggtgatgagtttgcattccagtatcgtctgtactggagtgcgcaaccgcctgttcattgcccattagcgcgcgttatggcgacgcgtaccggcatgggcggtttcagcgaaggttgggcgccaggtgaacactatcccgaaaaatgggcgcgtcgttttgccgtcgatttcgttggtggtgatctgaaagctgccgcgccaaaaggcattgagccggtgattacgctttccagtggggaagcgaagcaaatcgaaattctctatattgaacccatcgatggttatcgtattcagtttgactggtatccgactagcgactccactgatccggtcgatatgcggatgtatctacgttgtcagggggacgctatcagtgaaacatggctgtatcagtatttcccgccagcgccggataaacgtcagtatgttgacgaccgcgtgatgagttaatcgttttttcttcggcaccttcttcgggaggtgccgtctggttaaacacgatcccgctcgcatttttccctaagttaaatgagtaatctgatggtgtgtatttcagatacaccttgtcagccactaacagggagtgcgtatgtttccagaataccgagatttaatatcccgtctgaaaaacgaaaatcctcgctttatgtccttgttcgataaacacaataaacttgatcatgaaattgccagaaaggaaggttccgacggtcgagggtacaatgcggaagtggtccgcatgaaaaaacaaaagctacagttaaaagatgagatgctcaaaatcctgcagcaggagagcgtcaaagaggtgtaaactttcctaagccgccagccaggcggcttttttaacaactgcatggattgactggagataagatgactgaaacgataaaagtaagcgaaagtcttgaattacatgctgttgcagaaaatcacgtcaaacctctttatcagttaatctgtaaaaataaaacctggttacagcagagcctaaactggccgcagtttgttcaaagtgaagaggacacgcgaaaaacggtgcagggtaatgtgatgttgcatcaacgcggctatgccaaaatgttcatgattttcaaagaagatgaacttatcggcgttatcagctttaatcgtattgaaccactgaataaaaccgctgaaatgggctactggctggacgaatctcatcaggggcaggggatcatttctcaggcgctgcaggcattgattcatcattacgcccagtctggtgaacttagacgcttcgtgatcaaatgtcgggtggacaatccgcaaagcaaccaggtcgctttgcgcaatggttttatccttgaaggttgcctgaaacaggctgagttcctgaatgatgcctatgatgatgtgaacttatacgcgcgtattatcgatagtcaataatcacaataaccctgccagcggcgttcgcgtaatgcgctcctcgccgttaatgacttttggaccacggacatgaaccgtgtcgccatcaaaggcttcaacgacggcgtggtcggttaactccacatggttttcaattatcaccgcacctgtaatacggctctcaccttgtatgacaacgtgctcgtcgagcagaatcggtccgccacgtaccacggcatttccgccaaccaagacatgatgttttaacacacaattaccttccacaatggcatattccgccacctggctactgtaatgaatcgtcggaatggcatcttcttctatgccagctttcacctgcgcgtgaccgtagactttagcgcaatcgcatagccagacattgttctcttcattaccttcaatactggcaaaatcaaaaacttcggcgcgatgttcaataaaagcataccggacgacggcatcgccataaatttgtgcctggtggacaatacggctggcgctaacccttgcgcgatcataaatttggagcaggagttgatggtcgggcgttaagccttgtgcggcgacgatcatagaatgttgatcaattaaggcgtgaccaaatattctacattgcccgtaaactaaactgtcatgaatggtgacgctgtcacttatatatgcaccctggctgatttcactattatcgatccagacgttatccgttgcgtaaacctctccccacagcacgctggtgccggtgatacgcgtattaccggaaatcaccgctccgccgaacgcaatagcattctggtcgtaaatccagcaatttccttcttgtgctaacaccgtttcgcgatcgatccagccgccagcggttcctgctatcacatcgttaaaatcgctaatggcgataatctgccgtaataacacattttttttagtgccatcttcctgataactaaaggctcgctgttcttcacttagacgatatttgcgcatagcgttttcccacaggtgacttactataaccgtagcaaattctgcggctctggctatgctcgagaaaattccataaaatgcatttcaaatatactttataaattaaacaaaatgagtaagaagatgcagagcgataaagtgctcaatttgccggcaggctactttggtattgtgttggggacgatagggatgggatttgcctggcgctatgccagccaggtttggcaggtcagtcactggttaggggatgggctggtgattctggcgatgatcatctggggattattgactagcgcatttattgcccgactcatacgctttccgcatagcgtgctggcggaagttcgccatccagtgctgagcagttttgtgagtttgtttccggcaacgacgatgctggtggcgattggttttgttccgtggtttcgcccactggcggtgtgcctgttcagttttggtgtcgtggttcagttggcttatgccgcctggcaaactgcgggattatggcgcggatctcaccctgaagaagctaccacgcctggactgtatctgccgacagttgccaacaactttatcagcgcaatggcctgtggtgcgttgggctacaccgacgccggtctggtgtttttaggcgcaggcgttttcagttggctaagccttgaaccggtgatcttgcagcgtctgcgcagtagcggagaattacccacggcactgcggacaagtctcggcattcagctcgctcctgcgctggtggcttgtagtgcctggctgagcgtcaacggcggcgagggtgacacgctggcgaaaatgcttttcggttatggactgctgcaactgctgtttatgctacgtctgatgccatggtatctctcccagccatttaatgctagtttctggagtttcagcttcggcgtatctgcactggcaaccaccggtttgcatctggggagtggcagcgataatggatttttccatacgctggcggtgccgctgtttatctttaccaattttattattgcaatactgctcatccgtacttttgcgcttctgatgcagggaaaattgttagtcagaaccgagcgcgccgttttaatgaaagcagaggacaaagaatgatcattcgtgacgaaaactattttactgataaatatgaattaacccgcacacactctgaagtactggaagcggtgaaagtggttaaaccgggtaaaacgctggatctgggctgtggcaatggtcgtaacagtctttacctggcagccaatggttatgatgttgacgcatgggataaaaatgccatgagtatcgccaacgtcgagcgcattaaatccattgaaaatctggataatttacacacccgagtcgttgatctgaataacctcacatttgatagacagtacgattttattcttagcactgtggtgctgatgttccttgaggctaaaaccatccccgggttgattgccaatatgcaacgttgcactaaacctggtggttacaacctgattgtggcggcgatggataccgctgattatccatgtaccgtcggcttcccgtttgccttcaaagagggagaattacgtcgatattacgaaggctgggagagggtgaaatacaatgaagacgtcggcgagctgcaccgcaccgacgccaacggtaatcgtattaaactgcgtttcgccacgatgctggcacgtaaaaaatgacccggtaagcacaaaacgcgtgaaaattccccacgctgagatgatttactgttcttcttttcggtaagcatattttttatcgaagggatgtgaaattaatcacagtagtcgaagtttttagcagcttaacttactgaaatttaagtactgatgattgacttagcccctttttcggcattgactatgtcgtctgaaaaggggctgaaaaatttattttcaccaacactttttttgccacaacacgaagcggcgctttttgctataacttagaaagtaatataatcatctcaggaaactattcatgcgtaccacaagttttgcgaaagttgcagctttatgcggcttattggctctgtctggttgtgcatctaaaatcacccagccagataaatattctggttttttaaacaattactctgatttaaaagaaacaaccagcgctacaggtaaacctgttttacgttgggtagacccgagttttgatcaaagcaaatatgacagcatcgtctggaacccaatcacttattatccggtaccgaaaccgagcacccaggtagggcagaaagttctggataaaattttgaactataccaacaccgaaatgaaagaagcgatagcgcagcgtaaaccactggttaccaccgctgggccgcgtagtctgattttccgtggggccattaccggtgtagataccagcaaagaagggctgcaattctatgaagtggttcctgttgcattagtggttgcggggacgcaaatggctacaggccaccgtaccatggatactcgcctctattttgaaggtgagctgattgatgcagcgactaataaaccggttatcaaagtcgttcgtcagggcgaaggtaaagacctgaataacgaaagtacgccaatggctttcgaaaatattaaacaagttattgatgacatggcgaccgatgccaccatgtttgacgttaacaaaaagtaattccagacgcgccatcgttagatggcgctttttatccggtgcgccgtaaaaccccatccttcagggcggggatataaggcgcggttttccacctgaccaggtgtttgctgttgttcaatgtattggcggatgacggatattggcgcacctccgcagctactggcaaaatagccaggactccacaaaacgcctttgtagtaatacctgaatgcaatatctggtcgatctcgtcgcagtcacctacccgatacgcctttgaggctgtttaccagactggatatcgccagtttgggaggatagttaattaacaaatggacgtgatctggttcgccatccatttcaaccagttcagcttcaaaatcagcacatacatttgaaaagtaagtgcgtagtttttctgtcgcgtcatggtcaaaaatctggcgtcggtatctggtgacaaagagcaggtgaacatgcatcaggaaaacacaatgccttccacgccggatatcggtttcttttttcacagaccaaagtatcatttgacctgtgaaacgattacaggcatttaaattccagttaagacccggtggtcaacaggagtgtgaaatgaggcgcttcgcaggcgcatgtcgtttcgttttcaatcgtgctctggcacgtcagaatgagaatcatgaggccggtaataaatacatcccttacgggaaaatggcttcctggctggttgagtggaaaaatgccactgaaacgcaatggcttaaagattctcccagtcagccattgcaacagagtctgaaagaccttgagcgggcttacaaaaacttcttccggaagcgggctgcttttccccgattcaaaaagcggggacagaatgatgcattccgctacccgcagggcgttaagctcgatcaggaaaacagccgtatttttctgccgaaactgggctggatgcgctaccggaacagccgtcaggtcacgggtgttgtgaaaaatgtcactgtcagccagtcctgcggtaagtggtacatcagtattcagacagaaagtgaagtaagtactccggttcaccctagtgcaagtatggtcgggctggatgctggcgtggctaaactcgccacgctgagtgatggcacagtctttgagcctgtaaacagttttcagaaaaaccagaagaagctggcgagacttcagcgacagttaagccgcaaggtcaaattcagcaacaactggcaaaagcagaaacgcaaaatacagcgactgcattcctgtatcgcaaatatccgcagggactaccttcacaaagtcacaacggccgtcagcaaaaaccacgcaatgatagtcattgaggatttgaaggtcagcaacatgagtaagagtgcagcgggtacggtcagccagccggggcgcaatgtccgggcaaaaagtggtttaaaccgtagcatactggatcagggctggtatgaaatgcgccgccagcttgcgtataagcagctctggcgtggcggtcaggtgcttgctgttccgccagcgtatacaagccagcgttgcgcgtactgtggtcatacagcgaaagagaaccgcctgagtcaaagtaaattcagatgccaggtatgtggatatacagcgaacgccgatgtaaatggcgctcgcaacattttagcggcggggcacgccgttcttgcctgtggagagatggtgcagagtggccgcccgttgaagcaggaacccaccgaaatgattcaggcgacagcctgaacgtagcagggatccacgtccttcagggcgtggaggatgtcaatatcggtttctgtcagcgattaaattcaacaccacgtaacaaacgcctccggcaattaatccccaaaacgcagaaccaatcccgaccagcgtcaatccacttgccgttaccagaaatgccaccaccgccgcgtctcgctcacgctcattatgcagcgcctgatacaaactgccgccgatggtacttaacagcgccagacctgccagcatctggatccaacttacgggcagggcagccatcatcccggtaatggcactaccaaacagacctgcgagcaaatagaaaatgcctgcaacggcagcggccagccaacgttgatctttatccggatgcgcttccgggctttggcaaatagccgcggtgattgccgcaataccgacggaataaacgccgaaaggggaaaaaaccagtgccagcaatccagtaaatacaattaatgggctaacaggagcgctatatccagctgctttcattgctgcgatacccggtgcgttttggcttgccatcgtcaccagaaaaagggggagtgcaacgctcaggctgtgagcaaagctaaaatcaggggtaatataagtggggagaacgggtttaaagacaacatcagttgtgacaacgtcaccttgcgcgatgacgatcacgatcccaataatcatcgcggcaattaccgcatagcgcggcgcaacggccttggttgccagccataccagcaacatacttccacacaacgtaaattgaccgtccagactggcaaacgcctgtaaaccaaagcgtaataaaatcccggcaagcattgccgccgcaaggctgtgcggaataatgcgcatcagacgagcaaagagtcccgttatgccgcagaggactattagcgcgttggtgacaataaaaacgccgatggcttcgttaagtgttagtccctgcaatccggtgaccaacaaagccgcgccaggcgtactccatgcggtgagaacaggtacgcgataccataatgtcagagtcagcgtactgacgcccattgccagccccagcgccgtcatccagccagagatttgtgcagtggtggctccggcgacaatcgctgcttgccagattattgccgcactactggcgtagccaattaataccgccagaaaccccgccagtagcgtgggtggaggaatagaaaacagacgcatagtcacctcgtgcgttatagcgtacaggcaccgtagcatttgtccgttataacgcacaagtgataaacttccgttttgccggaggagtcgcatggaaaatctcgctcgctttttatccaccacacttaaacaactacgccagcagcgcggctggagtcttagccgactggcagaagcgacgggcgtttctaaagcaatgttagggcagattgagcgtaatgagtccagtccgacggtcgcgacattatggaaaattgccaccgggttgaacgtaccatttagtacatttatttctccgccgcagtccgctacgcctagtgtttatgatccacaacagtaggcgatggtgatcactagcctgtttccttatgatccacaactctgctttgaacacttcagcattcagatggcatctggtgcaataagcgaaagcacgccccatgagaagggggtaatcgaacatgtcgtcgtcattgatggacaacttgatctgtgcgttgatggggaatggcagacccttaattgtggggaaggcgttcgatttgctgcagacgtcacgcatatctatcgtaatggtggggagcaaaccgtacattttcattccctcatccattacccgcgcagttaagcgggaaaactatttcgcaacgtcgcgcttgtggctaaaatagccgccatttttcagctactggataagaatgtgaccgtatcttctcatcgacttgaactgttaagcccggcacgcgatgccgccattgcccgcgaagctattttgcacggtgccgatgctgtttatatcggcggccctggttttggtgcccgtcataatgccagtaatagcttgaaagatattgccgagctggtgccgtttgcccatcgttatggtgcaaaaattttcgtcacgcttaacaccattttgcatgatgatgagctggaacccgcgcaacggctgattactgacctctaccagaccggtgtcgatgcgctgattgttcaggatatggggattctggaacttgatattccgccgattgaactgcacgccagtacgcagtgcgacattcgtacagttgaaaaagcgaagttcctctctgatgttggcttcacgcagattgtgctggcgcgagagctgaatcttgatcagatccgcgcgattcaccaggctacggacgcgaccattgaattctttattcatggggcactgtgcgtggcctatagcggtcagtgctacatttctcatgcgcaaacagggcgtagcgccaaccgtggcgattgcagccaggcgtgccgtttgccatacacattgaaagacgatcaggggcgggtggtttcctatgaaaaacatctgctgagcatgaaagataacgatcagactgccaacctcggcgcgctgattgatgctggtgtacgctccttcaagattgaagggcgttacaaagatatgagctacgtgaagaatatcaccgcccattatcgccagatgcttgatgccattattgaagaacgtggcgatctggcgcgcgctagtagtggtcgtactgaacatttctttgttccaagcacggaaaagactttccaccgtggtagcacagattattttgtgaatgcccgtaaaggcgatattggcgcgttcgatagcccgaaatttatcggcctgccggtaggcgaagtagtgaaagtggcgaaagatcatctcgatgttgccgttaccgagccactggcaaatggcgatggcctgaacgtgttgattaaacgtgaagtcgtcggttttcgtgccaatacggtcgagaaaaccggagaaaatcagtaccgcgtctggcccaatgaaatgccagcagatttgcacaaaattcgtccacatcacccactaaaccgtaatcttgatcataactggcagcaggcactgacaaaaacctccagcgaacgtcgggtggcggtagacattgaactgggcggctggcaggaacaactgattctgaccctcaccagtgaagagggtgtcagcatcacgcatacgctggacgggcagttcgacgaagccaataacgccgaaaaagcaatgaacaatctgaaggatggtctggcaaaactggggcaaaccctctattacgcccgcgatgtgcaaattaatttgccgggggcgctgtttgtaccaaacagtctgttaaaccagttccgccgtgaagctgctgacatgctggatgctgcgcgtcttgccagttaccagcgcggcagccgtaaaccggttgctgatcctgcgccggtttatccgcaaacgcatctgagtttcctcgcgaacgtatacaaccagaaagcgcgtgaattttatcatcgctatggtgtgcagctgattgacgcggcgtatgaagcacatgaagagaagggcgaagtcccggtgatgatcaccaagcattgtctgcgctttgcctttaatctgtgcccgaaacaggcgaaaggcaatatcaaaagctggaaggcgacgccaatgcaactggttaacggcgatgaagtattaacgctaaagtttgattgccgcccatgcgagatgcacgtcattggcaaaatcaaaaatcacatactgaaaatgccgttaccgggaagcgtagtggcatccgtaagtccggatgagctgctgaaaacattgccgaagcgaaaagggtaaaacgccagttttctggttactcacaacttattgaatctgcatgatattgcctgccgggtaaggcgttacgccgcatccggcatcaaatgactcaacgttgtcccgcttctggtttgcggcttttttgccagtaaaaatgctcgcgcaaaccttccgcgctctcttccgccacagcacgcaattcatcgctgtccgcttcatgacgcagctgatgatccacattctttacccacacaaattcatgtcctttgtgccctgccatgagttgtccactaaacagagcacacgttaataagacaacgcttaacgccttcgtaaacatcctgccacctttttcttaccttttgccgctatgatgccgatcgtttcttgaggttattattcagttttgcaaattagcgcaaagaaattctggaatcttccttcctgattttgcattgcattctgccgttgcggcgatttagtgctattttcgagcaaattacacacggaggtaaacactaatgtttactttgttgatatactcagcggcagggaggcgatgtgaaacaaagcgagttcagacgttggctcgaatctcagggcgtcgatgtagcgaatggcagcaaccatttgaaactcaggtttcatgggaggcgcagtgtcatgccgcgtcacccctgcgatgagattaaagaaccattgcgtaaagcaatcctgaaacaactcggtttgagttaatcgccaattaaaaaggttaatgacatgcgagagacagtcgaaattatgcgttatcccgtcactcttacacccgcgccggaaggcggttatatggtttcttttgtggatatccctgaagcgttgacccagggcgaaactgtcgctgaagcgatggaagcggcaaaagatgctttactgaccgcatttgatttttattttgaagataacgagcttatccctttacctagcccattaaatagtcacgatcactttattgaagtacctttgagcgtcgcctctaaggtattgctgttaaatgcttttttacagagtgaaatcactcagcaagagttagccaggcgaattggcaaacctaaacaggagattactcgcctatttaacttgcatcatgcgacaaaaatcgacgccgtccagctcgcggcaaaggcgcttggcaaagagttaagcctggtgatggtttaattacagttaacgaaaagttgtcatttttaacaactgatatagactgccgaatcatctgcacataattacgattcgataatgaaaaaataccagcagcttgcagaacaattacgcgagcagattgcgagcggtatctggcaacccggcgatcgtttgcctagcttgcgtgaccaggtggcgcttagtggcatgagctttatgactgtcagccatgcctatcagttgctcgaaagtcagggatatattatcgcacgaccgcagagcggttattacgttgcgccacaggcaataaaaatgccgaaagcgccagtcattccagtcactcgagatgaagcagtcgatatcaacacttatatttttgatatgttgcaggccagtcgcgatccgagcgtcgttccgtttgccagcgcctttcccgacccgcgacttttccccctccaacaactaaaccgcagcctggcgcaggtaagcaaaaccgccacagcgatgagcgtgattgaaaacttaccgccaggaaacgcagaactgcgtcaggctattgctcgtcgctatgccttacagggcatcaccatttctcctgatgaaattgtcattactgccggggcgttagaggcattaaacctcagtttgcaagcggtaactgaaccgggcgattgggtgatagtagagaatccttgtttctacggtgcgttgcaggcgctggagcggctacggctgaaggcgttaagcgtggcgacggatgttaaagaagggatagatcttcaggcgctggaactggcgttgcaggagtatccggtgaaagcgtgctggctgatgactaatagccagaatccactcggatttaccttaacgccgcaaaaaaaagcacaactggtggcgttgctcaatcagtacaacgtaacgctgattgaagatgacgtttacagcgaactttattttggacgggaaaaaccgctgcctgcgaaagcgtgggatcgccacgatggcgttttgcattgctctagctttagcaaatgtctggtgcctggttttcgtattggttgggtcgccgccggaaaacatgcacgtaaaattcaacgcttgcagttgatgagtacgctttccaccagcagtccgatgcaacttgcgctggtggattacctttccacgcgccgatacgacgcccatcttcgtcgcctgcgtcgccagcttgcggaacgtaaacaacgtgcctggcaggcactgctgcgttatctgcctgcggaagtgaaaattcatcataatgacagtggttactttctctggttggagctccccgagccgttagatgccggcgaattaagcctggcggcactgacgcatcatatcagtattgcgccgggtaaaatgttttctaccggtgaaaactggagtcgttttttccgttttaataccgcgtggcagtggggagagcgtgaagaacaggcggtaaaacaattaggcaaacttattcaagaacggctgtaatagcgtttaatttaattcctcttagattgggtaatatgaatttcgaatagcagtcatatttcctaactccttgactatactccagaagataaccttacagacggcataatgcgcggtagctcacaacctgaataaattttctcaggggcgaaggtgtgcctgcaagccgccgtctatggttaaacaaggagatatttttacggcacggcggctgaacaattaattacgacaggagtaagaccttatgagcaagacatttgcccgcagcagcctgtgtgcgctcagcatgacaataatgaccgctcacgccgccgaaccgcctaccaatttagataaaccggaagggcgactggatattatcgcctggccgggatacatcgaacgcggacaaactgataaacaatacgactgggtaacgcagttcgaaaaagagacaggctgcgcggtgaatgtgaaaaccgccgcgacttccgatgaaatggtcagtctgatgaccaaagggggttacgatctggttacggcatccggcgatgccagcctgcgtttgattatgggtaaacgcgtgcagccgattaataccgcattgattcccaactggaaaacgctcgatccgcgcgtggttaaaggcgactggtttaatgttggcggcaaagtttacggcacaccttaccaatgggggccgaacctgctgatgtacaacactaaaaccttcccgacgccgccggatagctggcaagtggtttttgttgagcaaaatctgccggacggcaagagcaataaaggccgcgttcaggcttatgatggccctatctatattgcggacgctgcgttgttcgttaaagccactcagccgcagttgggcatcagcgatccgtatcaactcaccgaagaacagtaccaggcggtgctgaaagtgctgcgcgctcaacacagtttgatccatcgctactggcatgacactaccgtgcaaatgagcgatttcaaaaacgagggtgtggttgcttccagtgcctggccctatcaggccaacgccctgaaagccgaaggccagcctgttgctaccgttttcccgaaggagggtgttaccggttgggctgataccaccatgctgcatagcgaagcgaaacatccggtttgcgcctacaaatggatgaactggagtttaacgccaaaagtgcagggcgatgtggcggcctggtttggcagcttaccggtagtgccggaagggtgtaaagccagtccgttattaggcgaaaaaggttgtgaaaccaacggttttaactatttcgacaaaatcgccttctggaaaacgcctatagcagaagggggcaagtttgttccctacagtcgctggacgcaggattacattgccattatgggcggtcgctaacttcgctggggtgctttatgacgtacgcagtggagtttgacaacgtcagccggttgtacggtgacgtgcgcgcagtagatggcgtcagtattgcgataaaagatggtgagttcttctctatgctggggccgtccggctccggcaaaaccacctgcctgcgcctgattgctggcttcgaacagctttccggcggggctatctctatctttggtaaacccgccagcaatctgccaccgtgggagcgggacgtgaatactgtctttcaggactacgcgctatttccgcatatgagcattcttgacaatgtcgcctatgggctgatggtcaaaggcgtgaataaaaagcagcggcacgcaatggcgcaagaggcgctggagaaagtggcgttggggtttgtacatcaacgtaaaccgagtcaactttctggtggtcagcgccagcgggttgctatcgccagagcattggtgaatgaaccgcgcgtattgctgttggatgaaccgctcggcgcactggatctcaaattgcgtgagcagatgcagctggaactgaaaaaactgcaacagtctctcggtatcacttttatcttcgttacccacgatcagggcgaagcgttaagcatgtccgatcgtgtggcggttttcaataatggacgcattgagcaggtcgattccccgcgcgatctctatatgcgcccgcgcacgccgtttgttgccgggttcgttggtacaagcaatgtttttgatggactgatggcagagaaactttgtggcatgacgggaagcttcgccctgcgaccggaacatatccgcctcaacacccctggtgaactgcaggccaatggcacgatccaggcggtgcaatatcagggcgcggcaactcgttttgaactgaaattgaacggcggtgaaaaactgcttgtgagtcaggccaatatgacaggcgaagaactgcctgccacgctcacgcccggacaacaggtgatggtttcctggagccgtgatgtgatggtgccgctggttgaggagaggtgaatggcgatgaatgtattgcaaagtcctagtcgtccaggtctgggtaaggtgtccggtttcttctggcataatccggggctggggctgtttttactgctgcttggcccgctaatgtggtttggcattgtctatttcggcagcctgctgacactgttatggcagggattttatacttttgacgatttcaccatgagcgtaacgccggaactgacgctggcgaatatccgtgcgctgtttaatccggcgaattacgacatcattctccgcacgctgactatggctgtggcagtcactatcgccagcgccattctggcttttccaatggcgtggtatatggcgcgctataccagcgggaaaatgaaagcgtttttttatattgcggtaatgttgccgatgtgggcgagctacattgttaaagcctatgcctggacgttattgctggcaaaagatggcgtggctcagtggtttttacaacatcttgggctggaaccactgctgactgcgttccttacattacctgcggtgggcggaaatacgctgagtacttccgggctggggcgctttctggtgtttctctatatctggttgccgttcatgatcctgcccgttcaggcggcgcttgagcgtttgccgccgagtttgttgcaggcgagcgctgatctcggcgcacgtccacgacaaacctttcgctatgtggtgctgccgctggcaatcccgggtattgccgctggctctatctttaccttcagtctcacactgggcgattttatcgtcccgcagctggttggtcctccaggatattttatcggcaatatggtttattcccagcagggggcgattggcaatatgccgatggcggcggcattcaccctggtgccgattattctcatcgcactgtacctggcgttcgtgaaacgtctgggagcgttcgatgcactctgaacgcgcaccgtttttcctcaaactggcggcctggggcggcgttgttttcctacattttcccatcctgataatcgccgcctatgcgtttaacactgaagatgcggcgtttagttttccaccgcagggcctgacgctgcgctggtttagcgtggcagcacagcgtagtgatattcttgatgccgtgacactgagtcttaaagtggcggcgctggcgacattaattgcgctggtgttagggacgctggcagctgccgcgctgtggcgacgagactttttcggcaaaaacgccattagcctgttactgctgctgcccattgcgctgccgggcattgtcactggtctggcgttattaaccgcctttaaaaccatcaatctggagccgggatttttcaccatcgtggtcggtcatgcgactttttgtgtagttgtggtgtttaacaatgtcatcgcccgttttcgccgcacctcctggagtctggttgaggcgagtatggatcttggggccaatggctggcaaaccttccgctacgtagtgttgccgaatctcagtagcgcgttactggcaggaggaatgctggcgtttgccttgagcttcgatgaaatcatcgttacgacctttacggcaggtcatgaacgaacgttaccgttgtggttgctcaatcagcttgggcgaccgcgtgatgtaccggtaactaacgtggtggcactgctggttatgttggtaacaaccttgccgatcctgggggcctggtggctaacccgcgaaggcgacaatggtcaataaccactgatacaggaatatgctatgcaacataagttactgattaacggagaactggttagcggcgaaggggaaaaacagcctgtctataatccggcaacgggggacgttttactggaaattgccgaggcatccgcagagcaggtcgatgctgctgtgcgcgcggcagatgcagcatttgccgaatgggggcaaaccacgccgaaagtgcgtgcggaatgtctgctgaaactggctgatgttatcgaagaaaatggtcaggtttttgccgaactggagtcccgtaattgtggcaaaccgctgcatagtgcgttcaatgatgaaatcccggcgattgtcgatgtttttcgctttttcgcgggtgcggcgcgctgtctgaatggtctggcggcaggtgaatatcttgaaggtcatactagcatgatccgtcgcgatccgttgggggtcgtggcttctatcgcaccgtggaattatccgctgatgatggccgcgtggaaacttgctccggcgctggcggcagggaactgcgtagtgcttaaaccaagtgaaattaccccgctgaccgcgttgaagttggcagagctggcgaaagatatcttcccggcaggcgtgattaacatactgtttggcagaggcaaaacggtgggtgatccgctgaccggtcatcccaaagtgcggatggtgagcctgacgggctctatcgccaccggcgagcacatcatcagccataccgcgagctccattaagcgtactcatatggaacttggtggcaaagcgccagtgattgtttttgatgatgcggatattgaagcagtggtcgaaggtgtacgtacatttggctattacaatgctggacaggattgtactgcggcttgtcggatctacgcgcaaaaaggcatttacgatacgctggtggaaaaactgggtgctgcggtggcaacgttaaaatctggtgcgccagatgacgagtctacggagcttggacctttaagcagcctggcgcatctcgaacgcgtcggcaaggcagtagaagaggcgaaagcgacagggcacatcaaagtgatcactggcggtgaaaagcgcaagggtaatggctattactatgcgccgacgctgctggctggcgcattacaggacgatgccatcgtgcaaaaagaggtatttggtccagtagtgagtgttacgcccttcgacaacgaagaacaggtggtgaactgggcgaatgacagccagtacggacttgcatctagcgtatggacgaaagatgtgggcagggcgcatcgcgtcagcgcacggctgcaatatggttgtacctgggtcaatacccatttcatgctggtaagtgaaatgccgcacggtgggcagaaactttctggttacggcaaggatatgagtctttatgggctggaggattacaccgtcgtccgccacgtcatggttaaacattaaggataatattgcagatcgtaagagtatgagatgatcttgcgtactgtcagagcactgatttctctgacagtacgtgctgcgtgcaaaatcactacatcaaataaaccagccaaatctcatagagataagagtaaacaaaccaacagcagcaaagaaatttatcagtactacagttctactggaaacattcatttttgccaccttttatcattgcccctatgtgtatagtacgggttaagaaaatccgcaataatactcattctgaagatggataagggcaagttgctgtttgatgattttttctcaaactggtgaaaaaacttgatgcacgtcaaaaaatgacgcatatttgcgcgcgttttattcatctggctggacgcccgtacatgtctctctatcaacacatgcttgttttttatgcggttatggcagcaatcgcatttcttatcacctggtttctttctcacgataagaaacgcatccgtttcttaagcgcctttctggtgggggcaacatggccgatgagtttcccggtggcgctgttgtttagtctgttttaaatcttactcactggcttgacggcaccacgcagacttatatcatttggatgaatcgataaatttcacaagtggctaaggagaaagtatgagccatctggatgaagtcatcgcgcgcgtggatgccgcgattgaagagagcgtcattgcccatatgaacgaattattaatcgccctgagcgatgacgcggagttaagtcgggaagatcgctacacccagcagcaacgtctgcgcacagcgatcgcccatcacggtcgcaagcataaagaagatatggaagcgcgccacgaacagttaaccaaaggcggcaccatcctctgattaaaaactgcgtctggctaccaaccaggcgccaaccacaagtaaaattgcgccacaaattgggccgaacaacgcccgtagtggtacgccatgactgcggaagatatccagcatcagaccgccaatcagctgactggcgaccagtacagcaatagttgtcgccgctcccacattctgatatccgctgatactggcgaagacaaaaaagcttcccagcaagccaggtataagtgtccaccagcgcacgctggacaccagttcgccaaaccccgccatgccttgtttaaaccataaaatagaaacaaagagcacaatccccaccagactgttcagcaacatggcgatgagaatggtagaggaggtctgggtgatgcgcaccatcagcgtgttctggacaaccagaccaattccggcggcaatcaaaaaagcaagggtgaggctctgattcatccaatcgcgtccggttcagtgcgctcgtcgagttgcaactgcataaatgtcagatccagccaacgaccaaatttagtgcctacctgcggcatttgcgcggtgacgacaaatcccaggctctggtggagatgcaggctggcctgattttggctttcgatcccggcgaccatgacatgcttcccgcaatcccgcgcttcatcaatcaatcggcttaacaatttacgccccagacctttgccctgatgatcgggatggacataaacgctatgttccacggtatggcgaaaaccatcgaaactacgccagtcgccaaagctggcatatcccgtcactacgccgttttcctcgctcaccagcactggataacctgctaaagtccgcgcttcaaaccaggcaatgcggttatcagcatccaccgtttggtcattccagatagccgccgtatacaacacggcgtggttataaatttccgcaatggcagcacagtcggctttgcgggcaaaacggatggacatgtctggcctcaataaaataatgatgatgatgttatcaatactatcgaaaacagcccgaagcaacggattcctcgatgaaattattgcgtgttgcagaggggatgtgacggctgcaaacaaaaccaatcccgtgagcctgctactattgatggattcatgccaaaagcacaggagagcattatggggcaacaaaagcagcgtaatcgacgttgggttctggccagccgtccacatggcgcacctgttccggagaatttccgtcttgaagaagatgatgtcgccacaccgggtgaaggacaggtgttactgcgcacagtttatttgtccctggacccgtatatgcgtggacgtatgagcgatgagccatcttatagtccgcctgttgatattggcggcgtgatggtcggcggtacggtgagccgtgtcgtggagagcaatcatcctgattatcagtctggcgactgggtgctgggctacagtggatggcaagactatgacatatccagtggtgatgatctggtgaaacttggcgatcatccgcaaaatccaagctggagcctgggtgtgctagggatgccaggctttaccgcttatatgggcctactggatatcggtcagcctaaagagggcgaaacgttggtggtagctgcggcgacaggaccagtgggggcgacggtggggcaaatcggcaaacttaaaggttgcagagtggtgggggtagccggtggcgcggaaaaatgccgccatgctaccgaggtgttaggcttcgatgtttgtcttgatcaccacgcggatgattttgccgaacaactggcgaaagcgtgcccaaaaggtattgatatctattatgaaaacgtgggcggtaaggtattcgatgcggtgctaccgttacttaatacatctgcgcgcattcccgtctgcggattagtgagcagctataacgctacagagctaccacccggtccggatcgtttacctctgttgatggctacagtgctgaaaaaacgtattcgcttgcaaggttttattatcgctcaggattatggtcaccgcatccatgagtttcagagggagatggggcaatgggtgaaagaggataaaatccactaccgcgaagaaattactgacggtttagagaatgcgccacagacgtttatcggcctgctgaagggtaaaaacttcggcaaagtggtgatccgcgtggcgggtgatgattaaagtttcaacggcggcgtaagccgccataaaaatccaggcaaaaagcttattttcagctttaattaactaaccacatcattgttctgctgctaataacaacaaaggtgagtggtttatgattattcactttaatacaccaggtgaattccttctgccatgcaggcagggttggacagaaaacacgcgaaggaattaaaatgcctggaacgggaaaaatgaaacatgtcagtttgactctgcaggttgagaacgacctgaaacatcagcttagtattggcgcattaaaacctggcgcacgcctgattactaaaaatctggcggagcaattaggtatgagtattacacctgtgcgtgaagcattattacgtctggttagcgtgaatgcgctttctgtcgcacctgcacaagcatttacagttccggaagtggggaaacgtcaattagacgaaatcaatcggatccgctacgaactggaattaatggcagttgctctggctgttgaaaacctcaccccgcaagaccttgcggaactccaggaattgctcgagaaattacagcaggcgcaagaaaagggcgacatggaacaaatcattaatgtaaacaggctatttcgcttagcgatttatcatcgcagtaatatgcccatcctgtgtgagatgattgagcaactgtgggtcaggatggggcctggtttacattatctctatgaagcgattaatccagcggaattacgggagcatatagaaaactatcatctgttactcgctgcgttaaaagcaaaagacaaagagggatgcagacattgtcttgctgaaattatgcaacaaaatattgctattttataccagcaatacaatcgttaaagtaaatgcccggcaaataccgggcatcaaggtaattactcaaatctccacgcaatattcatgccgacaccataatttcgtccggggctaggttcgtaatatcgcccgttactctcattgacaatgacagaaccaacgtattctttatcgaataaattatcgacacgaccaaataaatccacagttaaattgtggtaattgtatttatacccggtgaataagccgacgagagtataagacggcgcttttgccgtattttcatcatctgccataatatcgcccatataacgcgcttccgtgcctgcataccaaccatcttccggtacataacctatgctcgcaaagcccatattacgggcgatccctggcatccgattaccgttacaatcctgttcattgcaaacattgctgcgataggtcgcatcaagccaggtccaggacgcgtttacgcgaaaatctcctgcgaaacgttgatcccatgccagttcagcgccttgacgacgggtctttccggcatttttgtaagtcgtacgcccaccgctactgctatcgacaacaatttcatcatcagtgtcggtctgaaacaatgcgagactaagcagcccatcaccaatacgcgttttactgccgatctcaattgtatcgttggtggatggttttaaacctaagttcataccgctttgcccatcagcacgataagacagctcattaatcgtcggcgtttcaaaacctcgcccggctgccagatagatattccaggcatcggtcattgcatattttaagctaccggcaggtagccatttatgataactggcatcaccgctgtcatcgccgttacccggagtaacgtaatggtcgttggaatcaaaccacacggagctgtagcgcacgccagcatccaggctcagtttttcgctcagctgccactgcgtctgtaaatagggatcgatgttccacatcagattgcgttcgtcgcgacgcaactcacctttttgcccgtactccggcatgccgctattcaggcggaagttattgtagcccttgcggttttcactcatgttttcgtagttcaggccggtagtgaacgtgaccggaacgcccagttcaccacggtgtgtccagcggctgtctattccctggtaatggcgttgcagggtaatcacgccgcccgcatgactcgggttaagttgtggtgccatgggtatactctggtactgggtcgtttctcgctctccggcatacatcatcacactcatatcatcccggctactcaggctacgctcatagcgcaacccagcctgagtttgcttgatggtttttcgcgtgtcgtactgttctgcacgaggcgcttgttgtggattagccttccattctgctttggttagcccacctgggtcatctgctttgatatccacactattgaaaatcagacttaatttgctggcttcatcaatgcgtacgcccagtttggcattggctaaatttttctgtgcgccactatggtcacgatagccgtgggtcgtaaaacgcgtggtactgacggtgtaatcgacatcgccaggctgtgtgccgtctcccgttgcgcccgttgctttcagcccatagcgccagctgccaaaactgccgtagtaactactggcttcaatggttggtggctgttgtccggtctgggtggtgacattcattaccccaccagacgcgttgccatacagggcagagaaggggccacgcagcacttccacattttgcacactgcttaaatcgatgttggatgtttgcccttgcccgtcgggcatggtggcgggaataccgtccacatacaggcgaataccgcgaataccgtaagtggagcgggagccaaatccgcgaatgctcagctgtaaatcttgcgcatagttctgccggttttgtacctgcaaaccaggcacgccggtcagactttcggacaagttaatgcgcggtgttgccaggcgcatctcctcgccatccaccacgcttactgctgctggggtatccagttcactaaccacctgcggtgcggcactgacaatcatagtctgttcatcagcggcaaaaacaacgggggaaaggacaagcagtgcgggcaaaacggtctgtcggacggaaaaaatcttcatgaaaaaagccaggttaagaatgggaaaacgccgtcatggtaatgaaattgtaaatttatggaaaatgaaacggcacaatacgttaagtaattgagaaaattgtagtcgtaacggcaagaaatgctccacatttgagaaaataatgattaccattcccatttataacaagagcgtaacgatgattacgcttagcgaagcattgtgaagcagcaaaaatatcggttcatcaaagggagtcgtcatgcatttacgtcatctgtttagtagccgcctgcgtggtagtttactgttaggtagtttgcttgttgttagtagtttcagtacgcaggccgcagaagaaatgctgcgtaaagcggtaggtaaaggtgcctacgaaatggcttatagccagcaagaaaacgcgctgtggctcgccactagccaaagccgcaaactggataaaggtggcgtggtttatcgtcttgatccggtcactctggaagtgacgcaggcgatccataacgatctcaagccgtttggtgccaccatcaataacacgactcagacgttgtggtttggtaacaccgtaaacagcgcggtcacggcgatagatgccaaaacgggcgaagtgaaaggccgtctggtgctggatgatcgtaagcgcacggaagaggtgcgcccgctgcaaccgcgtgagctggtagctgacgatgccacgaacaccgtttacatcagtggtattggtaaagagagcgtgatttgggtcgttgatggcgggaatatcaaactgaaaaccgccatccagaacaccggtaaaatgagtaccggtctggcgctggatagcgaaggcaaacgtctttacaccactaacgctgacggcgaattgattaccatcgacaccgccgacaataaaatcctcagccgtaaaaagctgctggatgacggcaaagagcacttctttatcaacattagccttgataccgccaggcagcgtgcatttatcaccgattctaaagccgcagaagtgttagtggtcgatacccgtaatggcaatattctggcgaaggttgcggcaccggaaagtctggctgtgctgtttaaccccgcgcgtaatgaagcctacgtaacgcatcgtcaggcaggtaaagtcagtgtgattgacgcgaaaagctataaagtggtgaaaacgttcgatacgccgactcatccaaacagcctggcgctgtctgccgatggcaaaacgctgtatgtcagtgtgaaacaaaaatccactaaacagcaggaagctacccagccagacgatgtgattcgtattgcgctgtaatagatatggcgagggtgaaaacggtgagacttgcctgccttttatcacggcgtatccggcactttcgtcagtaatctgaatttgcccggcacgtagccgggcaattttgcaattaactcgccgtttcaggcttaaacacaatttcctgtttttcttcatcttcctcgacgactggcgcagtgctgtgaatttcagcaacgcgtttgcgcacaccaaaccagcctataaccagcaaaataccgataatcggcagcgccgcgatagtataagtcccgttcgggtaatcgaacgccatcagcacaaggacactcagtaaaaacagtaatgtcagccaggaagtgaagggcgcgccaggcagtttaaaactgacatccgctgctttgccttctttaatcgctttacgcaggcgcatctggcacacgatgataaacgcccaactagcgatgattcccaggctcgcgaagttcaacacaatctcaaatacgcggctcggcaccagatagttgaggaatacgccgacgacatacacaactagtgtcgccagaatcccggcatacggcacatgctgacgactcattttcgccataaaactcggtgcggaaccgcccatcgccatactgcgcagaatacgtccggtgcagtacagaccactattcaggctggagagggcagcggtcagcaccacaatgttcataatgctgccgatatatggcacacccagtttagagaaaaacgtcacgaacggactttgccccgcctgatacgcgctccacggcaataacataaccagcaacaccacggagccgacgtaaaacaggccaatacgccaaatcacactgttaatggctttaggcaccatggtctgcggatctttacattctccggcagctgtacccaccatttcaatggaggcaaaagcaaacactacgccctgaatcaacaccagcgcaggcagcaaaccgtgggggaagaagccgccattatcggtgattaaatgaaagccagtggtgttgccatccagcggctgaccactaccgaggaacactgtacccacgaccaaaaaggtcacaatggcgagcactttaataagcgcaaaccagaactccatctccgcaaaccatttcacaccgatcatattcatggtgccaacgatggtaagtgcagcgagcgcaaagacccactgcggcacgccgccaaacgcaccccagtaatgcatatacagagcgacggcggtaatatcaacaatccccgtcatcgcccagttgatgaagtacatccagccagcaacataagcggctttctcacccaaaaactcacgggcataagaaacaaaactgccactggaagggcggtgtagcaccagctcacccaatgcacgcagaataaaaaagctaaacaagccacaaattaaataaaccagtgccagtgcgggccccgccatttgcagtcgggctcctgcacctaaaaacaagccggtgccaatcgcgccgccaatggcgatcatctgcacctggcgattgcccatcgctttgtgatacccctcttcgtgggcattaagccagcggcgtttcgcggcgtgttgatcactagtgtcggtgtcgtgtttactcattgctctccctgattgctttaatgaaaaagtcatataagttgccatgaacaatgtttattcatcctggcgatgatagttatcaccattattctttatgggtataaaactatcggcgcagcatcctacccgttatcgataaacgatgcaaaacatccccttacaatcctgaaggggattaatacaactgacgaaaaaatgacaaatccttttgctggttaacctgtgtactgtcctacacttaatctttaaaagattgtgaggggcatatgattaaggtgtatggcgtacccggatggggctctacaatcagtgagctgatgctaacactggctgatattccttatcagttcgttgatgtcagtggttttgaccacgagggagctagtcgcgagttattgaaaaccctgaacccgttgtgtcaggttccgacactggcattggaaaatgacgagattatgacggagacagcggcgattgcattgatggttctcgatcgtcgcccggaccttgcgccaccggttgggcgcgccgaacgtcagctgtttcaacggctattggtctggctggttgctaatgtctatccaacattcactttcgccgattaccctgagcgttgggctcctgacgcacctgaacagttaaagaagaatgttattgaatatcgaaaaagcctttatatctggttgaatagccagctcactgctgaaccttatgcgtttggtgagcaactaacgctggtggactgttatctttgcactatgcgcacatgggggcctgggcatgaatggtttcaggataatgccacgaatatcagtgcgattgctgatgctgtatgtcagttaccgaaattacaagaagtattaaaaaggaatgaaattatttgagtgggataccagaagattatgttatttattattcagtaactttatccacaatgatgggcgtaattaattaaattcatggtatgttttttaatttatatcactctccttttcattcagcgtgtctatttcatttcctctgaaaagaaactaactattcacatcgtgcagatgtttcagttgttaagtcaggcattctataatctcaaaatgtttttaatgatggatatgctcggagttggagatgcaattaatattaatacaaataaaaatatccggcaggtatgctaaaaggataaatggcgttctctgtatttattcgcaattatctgtaggacaaatatggagagcttgatgagtcagagctaaaacagcaattgattaataaacatgttgatttattcaagaaaatggatgtattttaaatgttgattcttaatataacctaatcaatagattatcaagtgagagctacacattattggaggggcaggggaaaacaccattttgggaacaatgcatcaggtactcttaccactgaagcaagatcatccggcaccaggtggtggtgcagtgctttggaaatggtcccctcgggggagttgtcattattttctatgctatttgcttattatattcatcaggtgaatttaataaattcctaatttgaaatatccactattaagctagtgtttaacgacgttaagatggcaatgtgcagatcatgttatcagggtggggcggtagcgtatattccttatacaaaccatcattcatttcaatgattgttattgaattatttattgttgtgaataaaaagacattatgaatattggtttgactttgcatatcaggttttttattactcgctgtaatgtacgagcctgtcgtgaataacgtcgagaacccatccgttgcgtttgtgattattttgttgactaaacagacacccgtttctctgaagtaaaatcccagactaaatcatcacataaccatgacatttttctgatattccccggtaacgccagataacgatgccaaatttaccgttatgttcaatcaactccctggtccatgtcgatttatctaccacaatcgccacgcgtggaggttcaaactccaccggcattgaccaggctgcagccataatgttacgccgctgggattgctcatcgaaactggtgatcaagaccgttgggccatgatttaacagacggctggcatggtgtaattctatggggatgaatcggctcatggtatcgcctcgcgaagaaggtttttttaagcgtagtccgtaacgcaataagtaacgaaattaacgggattggcgatttgcgaacgtgatgcatgtccgcgatcgcacaaaatagccggtgcggcgtctattccaggttataagttgagaaaaccactaagggaaacgcctgatgacgcccattctgaatcactattttgcccgtattaactggagcggagctgctgcggtcaatattgatacgcttcgtgcattgcacctgaaacacaattgcaccattccgtttgaaaacctcgacgttttgctgccgagggaaatacagcttgataatcaaagcccggaagagaaactggtgatagcccgtcgtggcggttactgttttgagcagaatggcgtgtttgagcgggtgttacgcgagctggggtttaacgttcgcagcttgttagggcgcgtagtgttaagtaatccgccagcattaccgccgcgcacccatcgtttgctgttggtggaactggaagaggaaaaatggattgctgatgtcggtttcggtgggcagacgctaaccgcgccgattcgtttagtttccgatctcgtgcagaccacgccacacggagagtatcggttgttgcaggagggtgatgattgggtgttgcagtttaatcatcatcagcattggcagagcatgtaccgttttgatctctgcgagcagcaacaaagcgattatgtgatgggcaatttctggagcgcgcactggccgcagagccattttcgccatcatttgctgatgtgccgccatttgccggacggcggcaagctgacactgaccaattttcattttacccattatgaaaatgggcacgcggtggagcagcgaaatctaccggatgtggcgagtttatatgctgtgatgcaagaacagtttggtctgggcgtggatgatgcgaaacatggctttaccgtggatgagttagcgctggtgatggcggcgtttgatacgcacccggaggcgggaaaataatttatgtcaggttgccggatgcggcgtaaacgccttatccggcatacattagcccggttgtagacctgacaggcgaagcgcatcagacaacggtttcagagttcaattgcccattcggcatgaaacaaaatcaccgctgtgccactaatggtgactttttccggttggttatcacgaattgtcaccgtcacttcaatcataccgtcacgccccaatgcgcgcccctgatggcctttaacacgcaacacgttgccatcgtggggcaatacgttgtgatgtaccaaccatgcacccatcgggccattggcattgccagtcaccggatcttccacaataccaatcgcagggctgaacatgcgaccatcggtttcgtttttgcctgggcggatctggaacgggaagaaaccattgcagccaatctttttgctgatagcggtcagcgcattaaggtcagggctaagggcgtcgatatccacttccggtttcagtgggatcatcactttactgtgtcctgttgttgccacctgaattggcaagcctggcagaatatcgtcctcagtgagatgaagcgcgttgataatcgccgcacgtgtttcaccttccagcggtggctcaaagcccggcgtaccttgttccaggctaatacgataatcatcgttgtgcttttcgatagtcacgcgatgttttcctgccaggcttgtttgccagatcgtgcaatttcctaaacctaacaccttcgcacgtacatagtgcgcagctactgtcgcgtgaccgcaaatcggcacttcaaccgttggcgtaaagtagcggatgcgcacatcgctgtcgtcgctgtgcagcagaaaagcagtttcgctatggcctaactcgcgggcgataagctgcatttgcgcttcgctaagattatcggcggggaaaacaacaccggcagaattgccgcgaaacggttgactggtaaaagcatcgacgtggtacacctgcggtttcattaacgttctcctgtgactggagaactatcatagcctgcaagtggccggagagcgaagggctatccggccagggtgaaattatcgccggctacgcacaatttgatatcgacgagtaaagtactcaaacggcgcgctccacacatgcaccagtcgggtgaacgggaagagcaggaagatggtcattcccaacaccagatgcaggcggaagacgaacgctacgccgttgagcatctcactgcttccaccacggaaagtgacaatgctttgcgcccaacccaccagcttcatcatttcgctaccatcaggatactgtgcactaaacggtatggtacttagccccaacagacactggatcagcaaaatgctcatgatgatgatatccggcgtagtggaagtggcacgcacgcgctgatttgtcagcctgcgccacagcagtcctgcgccgccaatcaacgtcaacacaccgcaaataccgccgagcaccatcgccatgagttgtttcgctgccactggcaaaaaccacgcgtacatccagtgcggcgttaacatgccgaacaagtgcccgaagaaaatccccaaaatgccgatatggaacagattgctccatatcaccatcccgcgtttatcgagcatttgactactggaggcgcgccaggtgtactgcccgtagtcgtagcgcagccagctgccgaggaaaaacaccgtcgcacaaatgtacgggtagatatcgtaaaaaaagacgttcagatactgaatcatttcccacctcccgcactgatgtcgacatattgcggcgcgacatcctggctaaagcgtcgctgatattgattaagcgggctgctgtcacacgccgtggcgttatcttcaataaacttcacctgttcctcttcccacactgcatcaagcgcctggcgggtgtcatcgcgctcttcgctgtttacttgttttgtgacactgtcactactaagggagcttcccgccagttgcagcagagcatcaaacaacgcgtaccacggtgcctcgcgttgttttaagcgaccgccaagcagggcgaggatcggcgcaacattgagcaatccttctttcgcctgatcgtcaggcagtacgcttaaatactccagatacagcggtagataatcgggcagttcccgacaatccagctgcaggccgaccttttcatactccgccagcaggtccaccattgcctggccgcgatcgcgggactcggcatgaacatgttcgaacagcagcaggctcgtggtgcgcccgcggtcaaacacttcgcaccattcggcctgtttatccagcagcggcgcgttaagcaggttgtgggtgaaatccgtaagcatcggcgcgtcgcggcggatcaacgccagcgcgtcctccttgcattcccacaacagctcgtccggatactccatcaacaggccgatcactttgaggatctgcattattcgccctccgctttgtcgcgcacttcggtgatgttgatggcatcgatacggctactgttgaacaggttgaatttactgtcgctaccgtggcaaccgtcgccaaaggtaaaaccgcagccgttgcgttctgcgaaggcatcgcccgccatttcccgatggctggtcgggataacaaaacgatcttcatagttggcaatggcgagatagcgatacatctcttcgacctgggcgacgctcaggcctacttcgtcgatggcacgagtatcagtaacgccttccacggtttgactacgcatatagtggcgcatcgccatcatccgtttcagcgcccgcagtaccggaccggtatcgccggcactcaacatattggcgagatattgcaccggaatacgcaggctttcgatggcgggcagcacgccttcgcttttcggcaaaccgcccgcatctgcgtaggactgaatcggactcagcggaggaacgtaccagaccatcggcagggtgcggtattcagggtgcaacggtagtgccagtttccagtccatcgccattttgtagactgggctacgctgggcagcgtcaatcacattttgtggaataccttgtttcagggcttcctcgatcacactgggatcgtgtggatcgaggaacacttcgcactggcgttcatagaggtcaacttcgcgctcggtgctcgccgcttcctcgatgcggtcggcgtcgtaaagcagcacgcccagataccggatgcgacccacgcaggtttcactgcacacggtcggttgaccggactcaattcgtgggtaacagaagatgcatttttcactcttgccgcttttccagttgaagtagatttttttgtacggacaaccgcttatgcacaaacgccagccacggcatttatcctgatcaatcagcacaatgccgtcttcttcgcgtttgtagatagcgccgcttgggcaggtcgccacgcagctgggattgaggcagtgttcgcacaggcgcggcaggtacatcatgaaggtgttttcaaactgcccgtacatctccttttgcatggcctcgaagttgcggtcgcgggcacgtttttcgaactcaccgcccagcagttcttcccagtttggcccccagatcactttgtccatccgtttgccgtcaatcagactacgcgggcgagcagtaggaatatgtttgccttccggtgcgctatgcaaatgttcgtagtcgaaggtgaaaggttcgtagtaatcatcaatctgcggcaccaccgggttggcgaagattttggttattacgcccatcttgttgcccagacgcgggcgtatcttgccattcacatcacgcacccagccgccttgccactcttcctgatcttcccagtttttcggataaccaatgcccggtttggtttcgacgttgttaaaccatgcgtactccatgccttcgcgcccggtccagacgtttttacaggtcacgctacaggtatggcagccgatacatttgtcgaggttaagcaccatgccgacttgactacggattttcattttttcgcctcctgtacctgatcgcgaccttcatcatccagccagttaacgttcttcatcttgcggatcatgatgaactcatcgcggttgcttccgacggtgccgtagtagttaaagccccaggccagctgcgcgtaaccgccaatcatatgcgttggtttcgggcaaacgcgggtaacgctgttatgaatgccgccgcgcatgccagttacttcgctaccaggaatattcataatgcgttcctgggcgtgatacatcatggtcatgcccggcggtacacgttggctgaccaccgcgcgggcagtcagcgcgccgttggcgttgaatacttccacccagtcgttatcgacaatggtcagttctcgggcatctgtttcgctgatccagacaatcggtccaccgcgagagagcgtcagcattagcaggttttcactgtaggtactgtgaatgccccatttctggtgcggcgtcaggaagttaagtgctttttccgggaagccgtttggcggtatctggcgcatctcactgacgctacgggtgtcgataggcgggcgataagccaccaggctttcaccaaaagcacgcatccacggatgatcctgatagagctgctggcgtccgctcagcgtgcgccacggaattaactcatgaacgttggtgtatcccgcgttataggagacgtgatcgctttccagaccggaccaggtggggctggagataattttacgcggctgcgcctgagtatcgcgaaagcgaatcttctcgtcctctttgtgcagcgccagatgggtatgttcgcgcccggtgatctcgcccagcgcctgccacgctttgactgcaacatgaccgttggtttccggtgccagtgccagaatcacttcactagcgtcaatggcggtgtcaatcagcggacgcccctgtgccgggccatcacgcttggtgtaattgagtttgccgaggaaatcgatttcatcctgggtattccagctaatccctttaccgccattgccaagtttgtccatcaatggcccgaggctggtaaagcgttcatacgtagcagggtagtcgcgctccaccgccacaatattcggcgcggttttgcctggaatcagatcgcattcgcctttgcgccagtcgagcacttcacacggctgactgagctctgccggagagtcatgcagtaggggttgtaataccacgtcggtttctttgccaagatgacccacgcacacttggctaaatgctttggcgatacctttgtagatttcccagtcgctgcgactttcccacgccggatcgaccgccgcagaaagcggatgaataaacggatgcatatcgctggtgttcatatcgtctttttcgtaccaggtggcggtgggcagaacgatatcggagaacaggcaggtactggacatgcggaagtcgagcgtcaccagcaggtcgagcttgccttcaatcgctgcagtttgccactcgacttcttccggtttgatcccgtcgctggcaccgagttcctcgccctgaatcccgctttcggtccccagcagatacttctgcatatactcgtggcctttgccggaggagccaagcaggttagagcgccagacaaacaaattacgcggatgattgctgctgctatctggttgttcgcaggccatacgtaaatcgccgcttttcagcgcctgggcggtaaattctgtgggggataatccggccttgtcggcttcagctttaatcccgagcgggttacgccccagctgcggcgcagaaggtagccagcccatacgttcggcgcgaacgttgaaatcaatcagatgaccgctgtacttactggcatcggcgagcggactaagtaactcctgagcagagactttttcatagcgccattggctggaatgattgtagaaaaagctggtgctgttcatttggcgcggtggtcggttccagtcgagcgcaaaggccagtggcaaccagccggtttgtgggcgcagtttttcctggccgacatagtgtgcccagccgccaccgctttgcccgacacaaccgcagaagatcagcatattgatcatcccgcggtagttcatgtccatgtgataccagtggttaacacctgcgccgaggataatcatgctgcgcccatgcgttttatgggcggtatcggcaaattcacgggcgatggtttcaatatactggcgcggcacgccggtaatttgctcaccccaggctggggtgtacggtttgatttcagcgtaatctttcgcactgttttcatcttccagcccgcgatcgaggccgtaattcgccagtaccaaatcataaacgctgaccaccggacaggtgttgccatcgactaacgtcaggtttttaacgggcaattggcgcaccagcaccggattgtgttttacgctgcgaaaatgcggattttcaatgccgccaaagtaggggaaggccacgcctgcaacagcgtcatgttgaccgagcagggttaagctcaattcggtttccgtaccggcggcaatggattccagattccatttgcctttttctccccagcggaaaccaatgctaccgttcggcactaccaattcacctgcggtattaactgctacggttttccactgcggattgttgctttcgcccagtccatccaccaggtcagatgcgcggatcatgcgcccgggaacgtagctaccatcgtcgcgaggctccagcattaccagcatcggcatgtcgctgtagcggcggcagtagttgataaagtagtcgctgggattatcgagatgaaactcttttaaaatcacatggcccattgccatcgccagggcgctatcagtgccttgtttcggtgccagccactggtcgcacaatttggccacttcagagtagtcaggggtaatggcgatggttttagtgcctttgtagcgtacttcggtaaagaagtgggcgtccggcgtacgtgtctgcggtacgttagacccccaggcgatgatgtagctggagttataccagtcggcagattccggtacgtcggtttgctcgccccaggtcatcgggctggcgggcggcaggtcgcaataccagtcgtagaaacttaaacaggtgccgccaagcaggctcagataacgcgttccggcggcgtaagaaaccatgctcatcgccgggatcgggctgaaaccggcaacgcgatccgggccgtaggttttgatggtccagacgttagcggcggcaatcagctggtttagttcctgccagttggagcggataaacccgccgcgcccacgcacttgtttgtagctcaggcacttttgcggatcgttcataatgcttgcccacgccagtaccggatcgctgtgttgcttgagggcttcgcgccacagttcaatcagtcgtttacgaatgagcgggtatttcaggcggttagcgctgtaaagataccaggagtaacttgcgccacgcgggcagccgcgaggttcatgattgggcaggtcagggcgagtgcgcgggtagtcggtctgttggatttcccaggtcaccagaccatttttaacgtagattttccagctacaggagcctgtacagttaacaccgtgggtggaacgcacgattttgtcgaactgccaacgctggcgatagctgtcctcccagtcgcggttgctatgcatcacctgtccgtgaccatcggcaaaggtttcgcccttttgtttgaagtagcgaaagcgatccaaaagtttactcatgacatgactcctgctccaggaatgaattgggatctgatgccttgtcggatgcgacacggttgtacatcaggcatcgatctcttatttttggctgaacttccgccgaccataaaccagccaggtcagcagcacacaaacgatgtagaagattaaaaacactttcatcgcgccgaccggagagccggtcatattgaggctcatgccaaacgcctgcggaataaaaaagccgcccactgcgccaatggcactgataaagcccagagccgccgccgtttcggtgacggcttcttcatgagcttgctcatcactaccgcctttcatctttacccgataaatggttatctggcgaaagatgacggcgatcatctggaaagtagaaccacttcccagacccgcagtcagaaacagccccataaatacggcgtaaaaggcgatgaaattaccggagcctgtgcccggtaaggtaaggaacagcagggcactgaaaatcgccataaaaataaagttgatcaacgtcacccgcacgccgccgaacttatcggaaatagcaccaccaacgctccgcgcgatggcaccgataaatgggccaaagaacgccaggcgcagaatattcacatccgggaactgggtttttgccagcatggcaaaacccgcagaaaaaccgataaagctaccgaaggtggcaaggtaaagcaggctcagcagccagagatgcaggcgttgtaagacagggagctggtcggcaatactggcgcgactactggcgatatcattcatcccactccatgcggcgatcgtggcaatcgccagtagcggtacccaaatccatgcggcattcgccaggctcatcacgctaccgtcggcctgcggtacgccattgacgccgagaaaggcaaatacaggtacaaaaatgaccagcggtgcaaccagctgcattacacttacacctaagtttcctaatccgccattaatcccaagagcgctcccttgtttggcttttggaaagaagaaactgatattgcccatgctgctagcaaagtttgcacctgcaaaaccgcatagcaaagcgataacgataaatatcccaaaaggagtattcggattttgcacggcaattccgagccagacgcaaggaataatcaggattgcagtactaaaaaccgtccatcggcgtccaccgaatataggcaccataaaggagtagggaacacgcaataatgcgccagaaacggagggtaatgcggttaataaaaagagttgatcggtagtaaaattaaaaccgattttattgagattaacggtaactgcgctaaatagcatccagacacagaaggcaagaagtagacaactgacacttatccagagatttcttcgagcaatatgttttcctttattttcccagaaggccggattttctggtttccagtcgcgcaaaagataacgactatttttctcattttgcagtgccatattgttcctcacatgcacacattggtaatgaaaaaaagacaaaacacgaggtaaggcgcaatagccagttattagaattaaggatgaattgggtgaagtgctgattgaaagaatagataagaaagcgtaaccgcgggggcagaatggggattaagtagccagatatgtgttactaaatgtaactaacaagctaaccttcaaacggggttaatctttgaacgtatgtcatgtttcaacccttcagatcgtgaatctaaagggttacatattaactatattatcaacaagaccagacacttatagaattagtgatgatttattcattaaaaaggccaactactggaggaaaagcttctgtccagaaggtctatcggttcctctcttattgcctgattgtaataatcgttattacagtaagtattgtttatttcatctaaggtcatgtttttaacttttatattcatctggtttacaacttcctctgtcttgtaagtgtgtatattatatggggtatatgcttttttaataggatagtgaaacaattcgttatccacatctattccgtcagagtgaacttcaaatgcaccagggctaagaattgccaggccagtattaagcttaagtgctggggaaaacaaattaaataacatgagctgcatagtagggcaattgttcttcccagaaacatttaaaaaatttaagttttgctctgttttattatggggaataaagttccaatatcggatgtattattagtatcaatgtgggttattttattattgtccagtcttaaacttttgatagatggaagataagtcaggaaatcaagatttatatatttcaactggttgttagcagcgtttaatgtctgaacattgcagaagttgctatagaatattttaatttcagaaagcaaattgttgttaataagtaacgtattcaagttgggaaataagtcattgtgtaaacttgttagtttattatgggatagatccagcagtaagagttcatttttattacctgcaacaatatcagttaattgattatggctgagattcaggtattgcagccattcgcaagattctaattgcacaaactctagttgattatgtgccgcactaaaataagtaacactactaagcctatctatatcaatatttctgagagcattattattcatagatatatgtgtaatacttacatttctgccttgaggaaaatttatactctcaagagcattactattcagacttagctttacgagtctatcgtagttggttgcatcaaaatgtgtgaattggttattatcaagattgatagatgtgaagttttgcagccctggtggttgagtggttaaattaagtccacttaaatcaatggtcacttcattagtgtcatcaattatatttcttactgcagtccagtactgcatttgtgcaagtggatcattgttgatgccgttaactaatacatgccaaagatgtttactacttattagttgatcaatgtcattggttggcagtaaattgttattgcttaagtttaaatattccagttttgtagtgtttttggcgtttaaatgtgcaatatggttgtcgtttaaagtgattgttttcatcctgggatgattgtgtaatataaggtcagtgatcatattgtgatgggcacttaactcaatcagagattcttgccgcggctgccgttggcttcatcgttatagcctttaaaatcatattcccagtgaccaaaaccaatcatttgatcattgatttgcgtttctcctttaaagccgagacgggcataagttttatcaccatcgtcacgcttatcatcagtaaaataacgtagagcggtaaccttgccataaaggtcgagtttattaccatccttgttatagacttcggcagcgtgtgctacgttcgcagctaacaaaccagttacaaccaccgcaactatttttaatttcatttaacagaatccttttaattatcgttaaacgtattttctaaacgaattttaaacggcgtcatttataaatgacatactgtttttaaaatagaatggtgattaaaaacaatgagaaaaatagatgaaataatattatttatcgatatgtgatcgaagtcgaaatgagatataaggtgaattactggtatttgaaatttatttttttaatattgtcggaatttatctgattaactaccgggccgtagacccggcagttattttaaccacgacgtgtcgccagccagcagagcagggaaccgccgcagaccatcagcgcgccttgccagaagctgaagctcagcggggcgctgagcagcacggctgcaagcgcactggaaagtacaggcgtaaaatagctacctaccgccataatggtgacattgccatgcaatataccgacattccatgcagcataagcaaatcctaaggtaaatgccgcagagatgagtttaatcatgacgggcgtgctaaatatcatttctggttgtggcgtaagaaaatagtaaacccacagacttgctcccgttagcaggacaaaaacggtaattccattaaatccgcgtgcgtatttattcgttactgtgcaataggctgcccagataaacgcaccaatgaacgccaggaaataactcaatgggctggtggtgatattattgatgatttcatcataatgtaacccattgtcaccgcctaacacccaacagacgccgacgagggctaataataatccaggtacaatcaaccagttggttttctgaccattaaacagaatggcaaagagaattgtcaggctgggccacagatagttcaccatacccacttcaatcgcctgatgatgggtcgccgcataccctaaggaaagcgccagacagatttcatagctgacgaataacagactcccggcgagtaaatagcctttcgggatttgccgaatacgcggaaatccaaccgtgaagattaacagcagcccgcttaaactatagatagcagctgcgccgccgaccgggccgagcccctcactgacaccgcgaatcaatcctaccatcgtgctccacaggacgatcgctatcagccctatgagcgttgctttttgtcgtgtcatgctcgctgttttgtctctcttgccgttaaaaattaagctgaattttatagcatttttttaactggcctgtcaggcagtggtgcgtttttctaccgctattgaggtaggtcaatttgcgaaggcggattattttgtggcaaacagatgttctttttgatttcgcgcaaaaagattcagaattttactgttagtttcctcgcgcagtaatacccctgaaaaaagaggaaagcaatggacgtcagtcgcagacaattttttaaaatctgcgcgggcggtatggctggaacaacagtagcggcattgggctttgccccgaagcaagcactggctcaggcgcgaaactacaaattattacgcgctaaagagatccgtaacacctgcacatactgttccgtaggttgcgggctattgatgtatagcctgggtgatggcgcaaaaaacgccagagaagcgatttatcacattgaaggtgacccggatcatccggtaagccgtggtgcgctgtgcccgaaaggggccggtttgctggattacgtcaacagtgaaaaccgtctgcgctacccggaatatcgtgcgccaggttctgacaaatggcagcgcattagctgggaagaagcattctcccgtattgcgaagctgatgaaagctgaccgtgacgctaactttattgaaaagaacgagcagggcgtaacggtaaaccgttggctttctaccggtatgctgtgtgcctccggtgccagcaacgaaaccgggatgctgacccagaaatttgcccgctccctcgggatgctggcggtagacaaccaggcgcgcgtctgacacggaccaacggtagcaagtcttgctccaacatttggtcgcggtgcgatgaccaaccactgggtggatatcaaaaacgctaacgtcgtgatggtgatgggcggtaacgctgctgaagcgcatcccgtcggtttccgctgggcgatggaagcgaaaaacaacaacgacgcaaccttgatcgttgtcgatccccgttttacgcgtaccgcttctgtggcggatatttacgcgcctattcgttccggtacggacattacgttcctgtctggcgttttgcgctacctgatcgaaaacaacaaaatcaacgccgaatacgttaagcattacaccaacgccagcctgctggtgcgtgatgattttgctttcgaagacggtctgttcagcggctacgacgctgaaaaacgtcaatacgataaaagctcctggaactatcagctcgatgaaaacggctatgcgaaacgcgatgaaacactgactcatccgcgctgtgtgtggaacctgctgaaagagcacgtttcccgctacacgccggacgtcgttgaaaacatctgcggtacgccaaaagccgacttcctgaaagtgtgtgaagtgctggcctccaccagcgcaccggatcgcacaaccaccttcctgtacgcgctgggctggacgcagcacactgtgggtgcgcagaacatccgtactatggcgatgatccagttgctgctcggtaacatgggtatggccggtggcggcgtgaacgcattgcgtggtcactccaacattcagggcttgactgacttaggcctgctctctaccagcctgccaggttatctgacgctgccgagtgaaaaacaggttgatttgcagagctatctggaagcgaacacgccgaaagcgacgctggctgatcaggtgaactactggagcaactatccgaagttcttcgttagcctgatgaaatctttctatggcgatgccgcgcagaaagagaacaactggggctatgactggctgccgaagtgggaccagacctacgacgtcatcaagtatttcaacatgatggatgaaggcaaagtcaccggttatttctgccagggctttaacccggttgcgtccttcccggacaaaaacaaagtggtgagctgcctgagcaagctgaagtacatggtggttatcgatccgctggtgactgaaacctctaccttctggcagaaccacggtgagagcaacgatgtcgatccggcgtctattcagactgaagtattccgtctgcctagcacctgctttgctgaagaagatggttctatcgctaactccggtcgctggttgcagtggcactggaaaggtcaggacgcgccgggcgaagcgcgtaacgacggtgaaattctggcgggtatctaccatcatctgcgcgagctgtaccagtccgaaggtggtaaaggcgtagaaccgctgatgaagatgagctggaactacaagcagccgcacgaaccgcaatctgacgaagtggctaaagagaacaacggctacgcgctggaagatctctatgacgctaatggcgtgcttattgcgaagaaaggtcagttgctgagtagctttgcgcatctgcgtgatgacggtacaaccgcatcttcttgctggatctacaccggtagctggacagagcagggcaaccagatggctaaccgcgataactccgacccgtccggtctggggaatacgctgggatgggcctgggcgtggccgctcaaccgtcgcgtgctgtacaaccgtgctagcgcggatatcaacggtaaaccgtgggatccgaaacggatgctgatccagtggaacggcagcaagtggacgggtaacgatattcctgacttcggcaatgccgcaccgggtacgccaaccgggccgtttatcatgcagccggaagggatgggacgcctgtttgccatcaacaaaatggcggaaggtccgttcccggaacactacgagccgattgaaacgccgctgggcactaacccgctgcatccgaacgtggtgtctaacccggttgttcgtctgtatgaacaagacgcgctgcggatgggtaaaaaagagcagttcccgtatgtgggtacgacctatcgtctgaccgagcacttccacacctggaccaagcacgcattgctcaacgcaattgctcagccggaacagtttgtggaaatcagcgaaacgctggcggcggcgaaaggcattaataatggcgatcgtgtcactgtctccagcaagcgtggctttatccgcgcggtggctgtggtaacgcgtcgtctgaaaccgctgaatgtaaatggtcagcaggttgaaacggtgggtattccaatccactggggctttgagggtgtcgcgcgtaaaggttatatcgctaacactctgacgccgaatgtcggtgatgcaaacagccaaacgccggaatataaagcgttcttagtcaacatcgagaaggcgtaagggggcgaacagatggctatggaaacgcaggacattatcaaaaggtccgcaactaactccatcacgccgccttctcaggtgcgtgattacaaagcagaagtcgcaaaacttatcgacgtttccacctgtatcggctgtaaagcctgtcaggtggcgtgtagcgagtggaacgacatccgtgatgaagtggggcactgcgtcggggtttacgataaccccgccgatctgagcgccaagtcctggacggtgatgcgctttagcgaaaccgaacagaacggcaagctggagtggctgatccgtaaagacggctgtatgcactgtgaagatcccggctgcctgaaggcgtgcccgtctgctggtgcaatcattcagtacgctaacgggattgtcgatttccagagcgaaaactgcatcggctgtggttactgcattgccgggtgtccgtttaatattccgcgcctcaacaaagaggataaccgggtatataaatgcacgctctgcgtcgatcgcgtcagcgtcggccaggaaccggcttgtgtgaaaacctgtccgaccggggctatccacttcggcaccaagaaggagatgctggagctggcggaacagcgcgtggcgaaactgaaagcgcgtggttacgaacatgctggcgtctacaacccggaaggggtcggtggtacgcacgttatgtacgtgctgcatcacgccgatcagccggagctgtatcacggtctgccgaaagatccgaagatcgacaccagcgtaagcctgtggaaaggcgcgttgaaaccgctggcagcggctggctttattgccacttttgccgggttgattttccactacatcggtattggcccgaataaggaagtggacgatgacgaggaggatcatcatgagtaagagcaaaatgattgtgcgcaccaaatttattgatcgcgcctgtcactggaccgtggtgatttgcttcttcctggtggcgctgtccgggattagcttcttcttcccgacgctgcaatggctgacgcaaaccttcggtacgccgcagatgggacgcattttgcacccgttcttcggcattgcgattttcgtcgcactgatgtttatgtttgtgcgttttgtgcatcacaacatcccggataagaaagatattccgtggctgttgaacattgtcgaagtattgaaaggcaatgagcataaagtggcggatgtcggtaagtacaacgccgggcaaaagatgatgttctggagcatcatgagcatgattttcgtgctgctggtgaccggggtgattatctggcgtccgtactttgcgcagtacttcccgatgcaggttgttcgctacagcctgctgatccacgcggctgcgggtatcatcctgatccacgccatcctgatccatatgtatatggcattttgggtgaaaggaagcattaaagggatgatcgaagggaaggtaagtcgtcgctgggcgaagaaacaccatccgcgctggtatcgtgaaatcgagaaggcagaagcgaaaaaagagagtgaagaagggatataatctcttttgaactttaagctgaaaatggcgctgtaaaaggcgccattttcatattgtagacaacgtaggctttgttcatgccggatgcggcgtgaacgccttatccggcatgaaaacccttcaaatccaatagattgcagtgaacgtgtaggcctgataagcgtagcgcatcaggcaatgttgcgtttgtcatcagtttcaaatggcgctgtaaaaggcgtcattttcatattgtagacaacgtaggctttgttcatgccggatgcggcgtgaacgccttatccggcatgaaaacccttcaaatccaatagattgcagtgaacgtgtaggcctgataagcgtagcgcatcaggcaatgttgcgtttgtcatcagttctaaatggcgctttataaagtgccatttttttattgcgtaaccagacggcgtaatcggctcacatccactgttttttctgcctctgccagactccaggcgttttgcagattcagccacatttgcgggctactgccgatcaccacggaaagtttaatcgccatttctggcgtcaaagctgcttttcctgtcagcaatcggcttgccgtactgggagcaatttccattgctctggcaaactcgcgcagactgacattaagttcgtccagactttcctgaataatgtcccccgggcggggatgattggccattttcattagtgtctttactctcagtagcgttccttcactgggaacactatcattattgttccttcctacgcaacaataatccatttagccatttcatgttggagagtgtgcgatgctgcgacccgaacatggcagtcgcagcaaaggcctcttagtgacggaaatcaatcaccatgcggccacggattttgccttcttccatctcagtaaagatggtgttgatgtccgctaacggacgcagggcgactttcggcaccactttaccttcggcggcaaactggaaggcttcagttaaatcctggcgcgtgccgaccaggctaccgaccacttcaataccatccagcacaagacgtgggatatccaggctcatagactccggcggtagaccgacagccacaacacgaccgcctgcacggacagcatcaactgcgctgttaaacgcagctttagctaccgctgttaccaccgcagcgtgagcgccaccagttttctcctgcacaattttggcggcgtcttcggtgtgactgttaatcgctaaatctgcgcccatttcggttgccagttttaactgctcatcattgacatcaatggcgatcactttggcgttaaagacattcttcgcgtattgcagggcgaggttacccagaccgccaagaccgtagatagcaatccactgccctggacgaattttactcagcttaacggctttgtaggtggtgactcccgcacaggtaatgctgctggccgccgcgctgtccagaccatctggcacttttaccgcgtaatcggcgaccacgatgcactcttccgccatcccgccatcaacgctgtatccggcatttttaacactacggcagagcgtttcgttaccactgttacagtattcgcaatgaccgcatccttcgtagaaccacgccacgctggcacgatcgcctggttttaaactggtgacacctggacccacttctgccaccacaccgatgccttcatggcccagaattacgccggttttgtcaccaaaatcgccattcttaacatgaagatcggtatgacatacaccacaacactccattttcagcagggcttcgccatgtttcagactgcgcagtgttttatacgtaacgtcaacatgatgatccttcgtaacaactgcagccttcatagttcctccttttcggatgatgttctgcatagcaggtgaggcaaatgagatttattcgccactacccagtatggatgagatctgaaaaagggagagggaaatagcccggtagccttcactaccgggcgcaggcttagatggaggtacggcggtagtcgcggtattcggcttgccagaaattatcgtcaatggcctgttgcagggcttcggcagaggttttcaccgccacgccttgctgctgcgccattttgccaaccgcaaacgcaattgcgcgggagactttctgaatatctttcagttccggcagtaccataccttcgccgttcagcaccaatggactatactgcgccagcgtttcacttgcgctcatcagcatctcatcggtgatacgactcgcgccggaagcaataacacccaggccgatgcccgggaaaataaaggcgttgttacactgggcgatagggtagattttatctttccataccactggattaaacgggctgcccgtggcgaccagcgcgttaccttcggtccaggcgataatgtcctgcggtgtggcttccacgcgactcgtcgggttagacagcggcatcacgatcggacgcggacagtgtttatgcatctcacggatgatctcttccgtaaacagcccggtctgtccactgacgccaatcagaatatctggttttacattgcgcaccacatccagcagactcagcacatcgctgtcggtatcccagtcactgaggttttcgcgcttctgcaccagtttggtctggaaaggcagcaggttcggcatcttgtcagtcagcaagccaaagcgatcgaccataaagactttctgccgcgccgcttcctcgcttaatccttcgcgctgggtctgggagatgatcatttcggcaatgccgcatcccgcactacctgcgccaaggaagacgatttttttctcgcttaactgaccacctgccgcgcggcttgctgcgatcagtgtgccgactgttaccgccgcagtgccctgaatgtcatcgttaaaagaacaaatttcattgcgatagcggttaagtaacggcatcgcatttttttgagcaaagtcttcaaactgcaacagcacgtctggccagcgttgtttcacagcctggataaattcatcaacgaattcatagtattcgtcgtcagtgatacgcggattacgccagcccatatacagcggatcgttaagcagctgttggttgttcgttccgacatccagcaccaccggaagggtatacgccgggctgatgccgccacaggcggtatagaggctcagtttaccgatcggaatgcccatcccgccgatgccctggtcaccaagccccagaatgcgttcaccgtcagtcaccacaatcactttaatattatggttcggcacgttttgcagaatatcgtccatattgtgccggttctggtaagagataaacacgccgcgactacggcggtagatctcagaaaaacgctcacaggctgcgccgacggttggggtataaataacaggcatcatctcatcaagatgattgtttaccagacggtagaagagggtttcgttagtgtcctggatgttacgcaggtagatgtgtttgtcgatttcggttttgaatccctgatactggatccatgctcgttccgcttgttcttcgatggtttcgaccacttccggcagtaaccccagcaggttgaagttacggcgttcttccatgctgaaggcactgcctttattcaacaacggaaattccagcagtacagggccagcgtaagggatataaaggctacgctgtttttttgtttttggttccatgtcactcactcttttttgaatatccatccctggggggcttttatcgtctttgctttaccgccagggcgtcggcctcaagtataaagcagataaaaacaaaaacaccattgcgcaggcaatggtgtttaatcgtcattgaggactgatggttatgaattacttttcagcggggcgttttctgccggttgggttatttactacgctggatttgtcaccttcggtaactattttgcgctggttagaaattttatggtccagtccaagaatatgacgtgcctgacggttgcttttcattttaactcctcaatcctgtagctagttttaaggacaacatcgccgtagcgaagaaacacgtgctaaacccctaaattaggttgccgatcaagcatagcaccttaaagcgtagggtgctggccactgaccacataattgatcgtttgctggtagatatcactgaggatgtcgttatcagaagcttcaacccatttggtcagctccatgagaatgtcatcttcagtgacaacaccatgctgtgcccgaaggccttgctcaatggcattaaccagagcgggttctgctgtactattttctgcctgataataagtaaacatagtgattctccgtgtctgtgtatttatggtgtctgctacggatcgcagatttataaagcacattcagcatggcaaatatttgccgcttcgttgttaagattagtcctggttgatgatttttatattttaacaccatgatattcatagggattgtgattggtatgatccgattaatattgatacaatatcttttgggttatatattcccggtaatctattgtgggaatttaatttaagtgcagaagtaatattttcgccggattttattcggaatatcctgcttatcctcgtgctgtttctcacgtagtctataatttcctttttaagcccacaggagagcaacaatgacaatccataagaaaggtcaggcacactgggaaggcgatatcaaacgcgggaagggaacagtatccaccgagagtggcgtgctgaaccaacagccgtatggatttaacacgcgttttgaaggcgaaaaaggaaccaaccctgaagaactgattggcgcagcgcatgccgcatgtttcagtatggcgcttagtttaatgctgggggaagcgggattcacgccaacaagcattgataccaccgccgatgtgagcctggataaagtggatgccggttttgcgattacgaaaatcgcactgaagagtgaagttgcggtgccgggtattgatgcctctacctttgacggcataatccagaaagcaaaagcaggatgcccggtctctcaggtactgaaagcggaaattacgctggattaccagttgaaaagctaaagcattgccggatgacgcgtcaggcgcgtgaatgcctgatgcgttgttagcatctttacagcgcccgccagcaccggagctcacgtccgtcctcccttattgctaaactttgccggacttcacatccgtgggttgccagcgggcaacgttcgtagaaaaaacagccttgcggcaacgtgcggtttcccggcagatccgttttacgtaatgcccattcttcctccagcggtttatcaatggcggggagggaatccagcaataatcgggtgtatggatgtgcaggtgccgtcagcacctgctgcgcgtcgcccagttctacaatctgcccgagatacatcaccgccacccgatcgctcatatgacgtatcacgctgacattgtgactaatcagcacataggtcagcccgtgattttcctgtagcgttaccagtaaattgaggatctgcgcctgaacggagatatccagcgcagaggttggctcatcaagcacaatcacgtcaggctggctagagagtgctctggcaatggcgatacgttgccgctgcccgccggagaacgcatgaggcaggcggtcgagatactccggacgaatacccacctgcacagccaactcctctgccaacgctcgccgctgttgttcactactacgcttagctatccagagcggttctgtgatgatgcgccacaccggtaagcgcggattaaggctagagagcgggtcctgaaacaccatctgcataatgcgttgactgccagaacggatgtactgcccgtggctcggttgcagcatacccattaaaagctgtgcgagggtgcttttgccgcagccactctcgccgacgatccctaaggtttcaccacggcggatctgtaaatcaataccattaatggcatgaacatgttccgtagttttaccaagccagtttttacgggccgggaaattgatatggacgtcgcgtaacgttaataacgtgtcagacacttataacctcctgctgcggataccaacaggcacagcgctggttgttgtcaccacacgctgtcagcgccgggacgttttcacactgtgcacctgccgcatagcaacgatcgcgaaaagcgcagccgtcaggcaaatgggtgaggtttggtaccgtccctggaatggcgggtaatagctggcgtggtactccatgttctggtgcgcattgcagcaaaccaatggtatacggatgccggggatgatggataacgtctgccgtcacgccgctttcaattacgcttccggcatacatcacgtaaacgctatcgcacagttggctcaccacggccatatcatggctgatgaacagaaccgcagttccactggcgcgggctttatgtttaagcaaacgcagtacctgcaactgcaccgtgacgtccagcgccgtagtcggttcgtcggcaataatcaattgcggctcgcaggagaatgccagcgcaatcattacccgctggcgcataccaccactaagctcaaacggatagcggctcataacttccacggcatccgggatttgcatctcttccagcaggtcaatcgctttagctctggcttcccgacgacttattggttgatgatggcggatcacgtccatcatctgaagacctattcgacgtgtcggattgaggtcggtcatcggttcctgaaagatcatcgccactcgtgcgccgcgccactgacgaagctgtttttcccgcgcgttaagaacatcttctcccagcagggaaatctgcccccgatgtacgcaataactgcccgtcggtagcagacgcataatcagcattgcggtgacacttttaccactgccggattctcccaccagaccgacaatttcaccgcggttaatctgcaaggacacattgttgagcgcgtgaacatcaccgttaaaaccggggaaactcaaatgcagttgttgaatgtccagaacgggttgggtcatgactgctttcctcctgctttttagttcaactctgctttcctcctgctttcgggtcaagcagatcgcgaataccatcaccaaagagattaaacccgacggcggtaagcaaaatcgctgcccccggaaatgcgcaataccaccactgatcgagtacatagttgcgaccatttgctaccatcgcgccccattcagcactcggttgttgagcacccaggccaataaatcccaacgtggcggccattaaaatcgcgctaccgatatccaggcttgcctgcacgatcagcggcggtagggagttacgtaaaatatgccagttgatcagatgccaacgagacgcgccaaaggttttcgccgcctgaacataggtatactggcgtacaactaatgcttgcccccgcgccaggcgcacataaaagggaattcgcacaatagcaatagccagcatggcgttaaacaaactcggcccgagagcggcagccagtgccattgtcagtaccaagctaggaatgctcagcataatgtccatgatgcgcatgatgatggcgtctgcgcgtccaccaagcacaccggatagacatccgagtaggctaccaatcatacccgcaatggcaaccacgactaatccggcgagaatactttgctgactgccgaccagtacgcggctaaacagatcgcgtcccacttcatcggtgccaaaccagtgcgccgcagaaggcggcaaaaggcgggcggttaaatcaatggcgttgggatcatgcgtcgccagccacggactaaaaatcatcatcaatagcattaatacaatgatgactgcgctggtcacggtgagcggactgcctttcagcatccataccagttttgcaccgttaaatcgcgtttgtttttgtgggcgtacggcggacgtttcctcgcttagcatcattcaccacctccacgtccgatacgcggatcaatccacaaatagagcaaatccaccaccaggttgaccagcacataagcaaaactaaccacgacggcaaagcccatcactgccgggaagtcgagcgcctgtatacttgttactacccatgcacccattccgggccaggcaaaaacggtttcggtgagcactgcgccatacaacaaatcgcccagcgccaaacccaatacggtaatgcttgggatcaacgcattgggtagcgcataacataaaacgatataccagccgggcaagccgctggcccgggcggtacgaatgtagtcttcactcaattgttccagcatcgcactgcggatctggcgagcgacaattcccaggtgaacgaacgccagcgttaatgccggtaagatgagatgttgcaacgcattgaagaagacttcaccgttgccttcaagcagcgcatcgagcagataaaagccggtaacgtgcgttggtggatccagccagtcatcaagccttccgccgccgggaagaatttgcagatgaccataaaacagcacaatgacgcccagcccaagccagaacgcaggtgtggagattccggtaatggccattattcgcaccagatgatccagccagcgatttcgccagactgcagagagtatgcccagcgggatgccaatcaggagtgccagcagcagggcaccaaaagccagctccagcgtcgccgggaaaaatatacgcaactcttccagcaccggacgcccggtacgaatggatgttcccaggtcaccatgaaacaggtcgctgacgtagcggtaaaactgtacatacagtggctggtccagtcccagttgctggcgaatattttccacgatagcatcgctggcgcggtcacccgccagtaaccgcgccggatcaccagggatcagatggctgataataaacgtaatcacgcagacgcccgccaccacgagcaccagcccccagcagcgttggcgtaaaatactccagaaggtcacgttatttactcatggtattgatattgaagacctgttccagcatgggattgaacacaaagcctttcacctctttgttcatcgccagttggtagtttttctggaacaggtacacataagcagcgtcatcaatgacgattttctgtgcctgctggtagtcccgggtacgctgcgtctggtcggtggtcgcaagcgcattgcgcagtaacttatcgacctcactgttttcatagaagctgcggttacccggcagaccttttttgtcactctcaaaccagtaattcataaacatatacgggtcggcaaaatccggactccagttgccaatcgcaatgtcgtaatcacctttacccactctgtcgcgcatggtggcgttcgccagcttttccagcttcacaatgatgcccagcttgttgagactggattgtgtcgccagagcaataggctcccagttcggatcgttatcggagtagagaaacgtcaggctggtgggtttgctcgtcactttatcccattcggctttggctttcgtttcgtcatggttgtattgcattgccgtcgcatcgtagccccacatgccttccggaatcgggccgcgcatctgttttccgttaccactcagaatgccgttaaccatgccctgataatcggtagaccaggaaatggcccgacgcagatccgcctgattaagaggcgctttgctgttattcagatacagataggtaacgcgcagactcggatactctgccacattgactttattttcctgcttcagggcgttgagttgatccaccggcagcgcatcggcaatgtcaatgtcgccacgggagagctgcaggcgacgggaggcactttcaccaataatttttacgcttacccgtttgaagttcggtttattgcctgggtaatgcggatttggcaccagaactaattgctgacctttttgccagcttttcagcataaatggtccggaaccggcggtattttgcgcgaggaagccgcgagcatcatccgctgcatgttcctttaagaccgccggattgataatggatgcaccgtcattcgccagcgtgtagaggaacggtgcgaatggttggctaagggtaaacttcaccgtatgttcgtcgggagcatcaatctttaaatctttgggaaatgcttctgctggcccctggccgatttttagtagccgctcaaaagaaagttttactgcttcggcagtgacaggtgtgccatcggcaaatttagcattatctttcagggtgaacgtccactctttttgatcgtcagacgctttccagctacttgccagatcgccttcaacgtcggtactgcctttatcaccgtccgttttgtactgaaccagccgctgataagacgggtaggtcactgtccagtcgttattatctattgttaccgccgggtcgagggtttgtggatcggcggccttaccaatcaccagcatatcttttggtacggcggcgtgcgcaaccgggaaatttgtggcaaggacgagcgcgagcaatgtgggacgaaagcttatgcttctcttcatgacagtttcctgattaactgacgtgctgtgtgccaggggatataaaacaagagaattgatcagcgagcagagggtaactcgctgcctggggtaattcgaagtgccaccattcgctggagataccgacaaaaccgccaccagtcattatcgcattcagcaacagccgattgcgctgagcggcgggcgggacggaagggtgataggcatgggagcgctcgtgcatttcatcgaaccctgcgcccatatcgaggatgttcccgtgctcatcacgaagcgtcaggtcgatcgccgtgccacggctgtgattagaaccgaccgtcacatcaacaacatattgcgggtctgggcaggcttgccacaacatcgcctgtgcttgttgtgggcgatacgcatcgtaaatcaccagttgtaacccactcagctgggcgatgctgatacttttcgccagcgcggtaatcgcatccttgtgtaacagacaacgcgcttgctgataaatagctttacctgtgatgttatcagcgcaggcgtatttcaattcgatctccagatcagggaagattacggctaaatcaaccagttcggtggtatcgctcataaacggttcctgtataagacaaaaattgctgcgctttccgcttatgcagatctcatgccatgccgggataagcgccagaatgctggcttaaagttatattttttaacttttgatcaacatttgtgcagcgtagtgcagttttggtgcaagaggggaagttaaggaaggaatctcccggaatcgtagctgaaatcacagtatttaagtgacagtgtcacgttaaatgaaaacccgcgagtgcgggcgagaggaatttgtcagattttcagcggtaacacgctgctcatccagcctggaatttcttcggcgggtagggggcgggaaaagaaatatccctgaataacgcgacagtggatcttgcgtagcatctcaaattgctctttggtttcgacgccttccgccacgacggttaaattgaggctttgcccaatgctggtaatggcttcaagtaaggcaaggatgcgtttttcggtcagacaacgatcgacaaaacttttgtcaattttgatttccgttaccggaagactgactaagcgggataatccggaaaagcccgtaccaaaatcatctacgcttaagcccacgcccatatcacgcaggatctgaatgcgcttaaagatttcggtatcgtgttccatcatcatgctttccgtgatttctaccgtcagctggtggccgtcaataccccaggcgtgcattgcatcagacacctgattaggcagttgattactgcgaaagtgcagcgcgctcaagttcacggataacgccgggatatgaatattctggctacgccattctgctaactgacggcaagcttccgcgatgacccagcgcccaatattttcgatttcaccaatctcttctgcgagaggaataaaccgactagggggcacatgaccatgcaggggatcgtgccagcgagcaagggcttcgatgccgtacagttcacccgtttctgcgaagatttgcggctggtaaaccagtttcagttggttattgctaatcgcttctttcagcgctgcgcctaaaaccaaacgctcttttaccatttcgttcatcgccgggctgaagaactgccagccgttaccgccattcttgcgaatataatccattgcattgtgagcagtggagagcaagtaatcgcggtttttacccaggtcgtagctgatgccaatactcaaggtaagcgggaagggtttatcgtcaatcattatcggcttgctgaccacattccgtagctcatcggcgatttgggtaatgttactgacgtcgttttcgaggctcacgaggacaaactgcgtaccttcgatacgacagagatactgatccggtttgagtttttcacgaaagcgattgaccacttccagcaatgcctgatcggcccacgcatagccaaggctatcaatcacatcctgaatatggtcaacaccgatgagatacaccacgggagagacggctttgtcgaccaggtcatcgaggtaattgtgcaggttattgcgatttggcagaccggtcatcggatcaaattggatgagttgttcaatatgctgacggcttttttcctgttccagcgccagcgcggccatatgctggctgatatctgccacgcgttcgataaaggcgctggtttctgctccactgctggttttaatttgcaggatccccgcaggcgcgccatcacgctgacgaatggtcgcactccagctttgcgcattttgaatttctgcaccgtgggaagaactcgcccagtgtatcggcatcccgttgcgcagtgcgaacaggctaacatggctttcgttgagtacagattcgatgttacgacaaatgatttcccccatttcatgaaatggcgggctgctgcacatggcggcgagaatattgccttcaagctggcgaatctgccgttcttcggtgatatcgctgaaagtcattaccaggttctgcagatgcgcgagcacgtcataaaccgggctgatagaggctttaatccagattttttcaccggtgcgcgtcaacagcagaaattcgtcctgatcgcgggcggttttccatagcaactgttgtaaacgaatgcggttatcggcagggaattcaggaatgttcaggagtgtatcgggctgcataccgctggcttcgctaatgcagtaaccaaacatttcggtaaatgcgcgattgcactgcacaatatggcgttccggatcgaggacaatcaccggtcggtcgagatggtcaacggcaataatcaattgtcgggtctgttctttttgcgccatttctacgctggcatcccgtaccagcgccaggtaataaactttcccctcggcgctcactttgcttagcgcaaaacgggtccagattttactgccgtcttttttctccagctgcagctcccgactcatcccctcaacacgcgctttaccgccttcacggttgtgacgaatgtattcaggatgcgcaggacgcaaatcccgcggaatcagcatatcaatgttattgccaatgacttcttcacgtttgtatccccagagcttctctgcggcggggttgaaaaacatcacttcatcattttcgttaattaacaccgcacccatcatattttgctcaagggcggggaaaaaaatgccatcggcggcattatccgcatcggttagcttcatgattacctctgcatcctggcgcatttaaagactggctttccagagttcaacacggtttctacctcgtcttttggcgatatacagagcttcatcggctatttgaatgaggcgctcatagtcaggatgaccattaaacatggcggcaccgatggaaagactgagggcaatatcttcgccgtttgcggctttcagtttggttttctccacccgactgcgaatacgttctgcggtacgtaacgtttcgttttcagaagcttcagtcaaaacaatgataaattcatcgcccccgtagcggaaaacataatcactactgcggacgttgtcataaaaggcctgagagactttacgcagaatttcatcaccagtgttatggccccacgtatcgttgatctctttgaatttatcaacgtcaataatcagcacactcagcggtgtaccggtccggttggcatgggcaatttcgcgtttgaagatagtcggtaggaaacggcggttaagtaatttcgtcagtacatccataccgacttcgtggcggcttacttcttcaaacaattcacgcagcaaggtaataatttggcttacggtatttcttatctgtaataaaaatttcacccgcagacttctgttattcaaatttctggtgttacgcatggtttgattgaaaataccgtcgaaatcctgaatcagacgggagatatggcctacttcggcaataccactaaaataatgtcgacctttatggttaaaccacaggccaaaatcagcctggcttaaaggcaaactactgcctaaatcagaatccagcaggattttatagataatatctatttcccaactaagtatactggctatttgccgttctttttcttcttcggcgttttccagtaagctgaagatacgatagttttcatcttccttactggcactactgtcactaaaggtaaacgcgcgagtcatcacttccatcgcgatatcaatactgttaatgctgaaatggtagacctgaagtttttctgcggcggaataatcgctagagaagatcaccggatagaggatttttttcagcacccgaaaccccatctcgacaatttctaccggaattcctatgcgggcatgcacttccgcgacggtatgctggatttgtattagcctttcgacatcgtcaacctgggcagaaagcacgttaataatccagcgttccatcgcactcttcaactgccgctcaacttgttcattactcaagaattcttcggcatgcgggtcgatgcggacaattcgataaaactcgatactcagataatgagcatgcgcaacggcaatttccgcggctttagcacgaatgggcggatctgcctgttcgacaagtccggtccactcatctttcattcttttaaaatacatctccataattcacacccttataaggctgggaaatcagacggaatcaaaatgaaacgcaacgtgcgagatcgactaactgcaccatattctcctgaaatatgaagatatactgaaaagaaataagcgatttaggacagtttcaatctacgctactgttcttcagaagagtatagcccatcgtaattatttttcggtgacagcgaatatcgtatggtttttcatattcatacatttttattagggatttatggctgtttaactaagtgtggttaatttgacttaagtaagcatgattattagtgggatagtttaagagggtaacaagccggtgggtaaagcaccggcttgttacaaagtaagaatgggagtttaactgccccagcgactttgcagatagctgaccgcttgttgagtctgcggtttattcagatagtcctcacggaacaagatggtgccgctaatttcgggcacagcatcgttaagatcgagctgctttttcagttccggtacgccgccgttaatcatccagtctggctctatcttactaggttcacccactttatagaaggcgataccgatatacaggcgggtcctggtcggtttaacgacatccgcccaccattttgccaacacgtcataacgcgcggcactccgactgaacggccagtaaatttggggagcaatgtaatccagcaatccttgttccacccatcgacgggtgtcagcgtaggattcgtcataggctgccgcgcctcgggtatcggaaccgagcggatcgtgacttcggttacgccacacgcctgccgggctaacaccaaattcgactcccggcttaatgcttttaatggtgtggcttacctttgcaattaactgctgagtattgttgcgccgccagtctgctttactcgcaaatgcgcctccgtatttacggtacgtttcgttatcatttagccgactacccggactctccgtatagaaatagtcgtcaaactgcacgccatctacgggatagcgggaaaccacttctgcgactatacttgtgatccagtcctgaacctcagggatgcccgggtcgaggacaaagcgatcgccagacgttctgatccagtcgcggtgttgcacatagacgctcgccggttgttgagacagagtgctattcagttccctgatagtaccgggcttcgtattaacgcttacgcgataggggttaaaccaggcgtgtactttcatcccacgcttgtgggcttcgtcgagcataaattgcagcggatcgtaacccggattttcaccaatcttaccggtcataagatcggaccacggcaaaattttgcttggccacagggcggtaccgtccggcttgacctggaaaaagaccgtgtttatgccgagacgttgcagatgatccagtttgtcgatcatcgcctgttgttgtacacgggcccggctggtggggttactaatgttaacgctggaaaccggtggccagtcgagccgagaaaccgtggccagccagatgccacgcatcggttgactgctttgttgcgtcgtggctggtggcttactacctgctggtggtgtcaccatggactctggaggcgtgcttttacaactacacagtaaaagtgccagtgcaactagtatcgctggtcttctaatcgttaatttcttgtttcgggagcagatatccatatgtgctggtttccggtaaacagatgtgcgctcattctcgtacttatccccgttaagtcaatacgacagcaagcacgaaaaagggagcgatgaattatcgctcccttgtcttataaccattcagacatggttagtgtttcttgtcattcatcacaatatagtgtggactacgtgcacgcgggtgcagggagaagtgaccttttggtgcgttctgactgttgattggctccagagtgacgccggtatttgctttgcctttacgatcatgaacagcatagagaataaagggcagggcaagtaccaccaggaaactaacaaccagtaattcaacatacatatcggtagaatcaccctggatgttatccggcggcaggaaggaaacaataaacgccataatactagtcagcagaccgacaattgccacgaccagtttcacccctttaccaccagggatattaaatgtgcgttttaagtcaggatgtttaagaaccaacacaatgtagccaataaacagcatgaaataagcacacagataaatcaccaccgtcagcgccagtgcgatcaggaaggacatgttgttaccgccaccggtattggtgaggatgatcaacgcgatagacgtaatcaccagctggctaatgaccagcgttaccggtacgccatttttgttcattttagcgaatgccgctggcagcaggtttttctgcgctgttacatacatcccgcgagaaggaccaacaatccaggaggcgatttccgccagaacacccagcaacagcagtgcggagatcacgcgaaccgtccactcaatttctggtgccacatgggacatcagaacggtaaaggtttgcattacccctgcggagaggttgatttcattacccggaatgaccatcgcaatagacaaaccaccaacagagcttaagcagattgccgccaccatcagcagtaacatagccaacggatagtcgcgccctgggttgctcatttcattgacgtgggttgcggatgcttctacgcccatataactcaaaatgaaggcaacaaatactaccagggtgcccactttagagaagtcagggaagaaggtcttgctatccatttcgatagcaacgggggcaccggagtgcagataaatagccgctaatgcgatcaaaataaatgcaggtaacaggataccggcgaagaagccaactttagcaattcgcgccgtgtatttcgtgccaccaaactgcgttaatgccagcgcccaaagaatgatgagtgctgcaatagttttggtaatggggtcttcattcagcgctggccatttcaggatgtaggagagtgcccctaacacgaaatagagcatcggaataaaaccaatggcgatttgcagatagccaaaactgatcgctgcaaatccccatctcggccccagagtattacttacccaggcgaagacaccaccttcttcccagccgtcgacggtggccatttccgcagcacaaagtcccacgggaataaaccataaaatcccgcctaatagcaggaagaagactaaactaaagccgcttgttgcgaaggtagggtattcataaacagccattaccatgcttgccgttatggcaaagaatccaagtaatgtgagctgcttagctttacctgtctgtacacttgtagccatattatccccctaaaacggtattcctgtcggaaccgcacctgttttgttctgaagcgtattcagaacaatattttccgttgctaatgccagtgaacagactttggaaattgtcccgaaacgggttcgtttcgggacaccgttaccgttaaacgttatcaggtatgtttaaagctgttctgttgggcaataccctgcagtttcgggtgatcgctgagatatttcagggaggctttgtagtcttccagcaacagttcagcaaagtccatttcgaagccgcgacgacacataatgcgcatcaccacgatgtcggtggcttcaccgccgagagtgaaggccggaacctgccagccgcgcagacgcagacgttcagagaggtcatacagggtgtatcccggatcttcaccatctttcagtttgaagcaaaccgccgggatgccttcgtccgggcgacccgtacagatgaactcatacggccccagtttggcgatttcatccgccagataagcggcaacctggtaagaggcgttctgtactttggtatagccttcacgaccgaggcgcaggaattcatagtactgtgcaattacctgacccgccgggcgggagaagttgatggcaaaagtaccaatttgaccacccaggtagtcaacgttgaacaccagttcctgcggcagcgcttcttcgtcacgccagataacccagccgcagcccagcggagccagaccgaatttatggccactagcactgatgcttttcacacgcggcaggcggaagtcccagacgatatccggggcgacgaacggtgccaggaagccaccgctggcagcgtcgatgtgcatgtcgatgtcgataccggtatcggcctggaatttatccagcgcatcgtgcagcggttgtgggaactcatagttaccagtgtaggtcacgccgaaagtcggcaccacgccgatggtgttttcgtcacaggcttcaatcatgcgtttcgggtccataaacaactgaccggggcgcatagggatctcacgcagctccacatcccagtagcgggcgaatttatgccagcagatttgtaccggaccgcacaccaggtttggtttatccgttggtttgcctgcagcttccatacgcttgcgccaacgccatctcatcgccatcccgccgagcatacaggcctcggaagaaccaatggtgttggtgccaacggcctgaccatttttcggcgcaggcgcatgccacagatcggcaaccatatttacgcaacgcaggtcgatggctgcggattgcggatattcttctttgtcgatccagtttttgttaatggataaatccatcaatttgtggacattttcgtcgtcccaggtctggcagaaagtggccaggttctgacgagcgttgccatcaagatataattcgtcattgataatctggaatgcgacatcgtcgcgcatttcgtgcagcggaaaacgtttactttctgcgatagtggaaatagacttcgcaccaaaacgactatcgagtagttcgctccttaaatccgttacttgcttcttatccattttaaactccttaaaatgattggatcgcattaaaaaagtaggatttatcgataaagtaagcaagtgcaaaggactcgtgtttaaataacaaaatcctaatgttatttatcgtgagatattacgcgaataatattttttcattgaaaaacaatacaatatgaaattcttgggtggtggtaaggtgttttatgctgttatttttatgcgcattctgtgtctcctgaattatcacgtaaaaatcagaccttaaaatatcactattagtacttgattattattttgaacgcatttataaaattattacataaaaatagcgaatattgctaaaatccccgccaacgatgtgttgacggggctgttattattttggcaataatactccggtataagtatttaccggatgagaaagatattgtttaacggcagtgttaacattctctaccgtcatttgtttcaacaattgctcctgctcagtccatgctgcaggatcgtcatattgaataagactatttacaatagtgttcgctaattgttgaacgctacgctgttggatatcgaggctgcgctgaacgttttgctggtattcattcagttcttgctcactgatccctttagccagacgcttaaccatcacttcattcgctaacgttaacagttcatcatgtcgttctggttgacaagtaaaagccagcaaatgactgatatctttggcctgaggatcaacgctgaggcgagaagaaacgctgtatgctccagatgcctgttcacgaatattaacacgtagatcttttgccagtgcgacgttaaaagcatcgagcgccatacgcgtcggcagattaacaggtgtccgggaatcataacgcttccactgactaacctgtgccacaggttcattttgttcttttacagtaacgcttgcgttgtccgtcgcgcgagttaatggtttacctgcggctaatgggctatcagagtgtttgatacttcctaagtaacgcgtaattaacgccacgagtttgtcttctgcgacattaccgacaatgacaaacgtgatatccgctggagaactaaacaattggcgatcggcagccagcgcatctgcggcagtaaactgtgcaatctgattttcttgcagtaatttcgtgcggtcatcagcatagcgcgtctcatacatctgctgggcgaatttctccgctggacgctggtcgagcgttttcaacgcctgaatttgagcattttgtaggcttgcccaaatattatcgttaatcgtgctgtgggtgattcgctggttaatcaactgaaaaccaggttcagggttattagtccgcgcgctaacggagagcaacgtattcatgccactgactttactgctcatggttacgctattttccgcactccagcgtttcaggctggaagaggagagttcgccaacgccgcttccgctaactgctttatttgccagcgcgataagacttttttgctgcgcagggaaacttaaatcgcctttattgcttacggcaataatttgtagcttttgctcttcacccgcggattttgccagaataaccctggcaccattggaaagtgttaaacttgtcagattctccgccagcgtttctttgctgctaatttccgcctgtgggtctgcgtctactgttaagcttaaatttctgcctgggaagacgtaagccgccagctttttgttggcgtactccttttccagcgccaggatagccgcaggagacaatgcttttttggcggcaacctcattgtttaccatttgctcccaaaatgcgtcctggttctttcttaactgctgccatttttccgccagactttgcacggtaatttgctgccacagacgtttgctaagttgatatgtctcttccgggctcaagaacggcgtattatttaaactgctggatgccaggcgactggtcagcatacgtaaatcacgttcagcttgctgatcaaccgcatttttcagccaggtgaggcgggtagatttgacatcatcgagttcttcagcagaaaaaccatgctgatcaatggttgccaactctgccattaatgcattcgcagcatcctgcatattatcgtctcgtgcatttacacggaaaaacaggctctgataatcgggtgcaattttaacgctgcgcgcagtgccgccagaaatagtcttcaactcgccgctctgtatgcgttcctgcagacgttgattgaacagctgaactaacatgctccattcagcttgttcgataaagctttgctcatcgttcacttgtaccattggcaggcgataatagagtgcgatgccgttcacccggttttctttatcattaatgatattaaagcgcaggtggttttcggcttttgtcggccagacgcgattttcagctgctttgttagccggaagcttacttaaattatcctttatcagcgccagcgcttctttactgtcgatatcgccgaccacgataaaggtcatattatttggttgataccagcgttgataaaattggcgcaattgtgccggtgtgaccgtggcgacagtatccatcaggccgataggttcacggtctaaattacgggtatttgccagcaggaaagggcggcgcgcctgagaggtgcgccatttcgcatcctgatgggcacgccattcctcagtaattacgccacgttcagcgtctacttcgagtttttcaaaggttgcggcattactccattcactgaagattgccatcacttgttgcagattttgtttctgcgtagtcggcaaactcacctgatacaccgtttcgtcatagctggtataggcattaacatcgcgaccaaaacgcaggcccatactctcaaatgtttcgatgactttattacccggccatgtttttgtgccgttaaacatcatatgttctacaaaatgagccacgccgagctcattgtcttcttcctgcaaactaccggtatgaatttgcagccataaatttacctgatcctttggatgagcatgcggataaatcatatatcgcaagccattgtccagttgcccggtaattaacttttcatcctgcggtaaggcggcggcaatcagccgcccggggagcaacagagttgccactaacgtcagtaagaaacagaggtttctcataattatctccatgcgaaaaccgggcgaatttacccggttaagtaaaatccgaactattaaaatttcatgctgacatcaagccagaaagtacggccactggcgtaggtcgccacaccggtgttcgttgtatcaacagcggttttgctatccagtacattgagaatatcggcactgatcgtcaggttttgttgttgcagaaattgtggcgtccaggacaagcgggtgtcccaggtcaggctgctatccagtttttcgtcaacatactgcttgtaatcactatattcgctgatgtattgcgcatttgtcttaccaaggataatgcgagctttacgcgcttcttgccaggccagcgtattcgcccacactaacccgctcggttgatgcgtgaaatccatgtttaaggagatctttaatgggttattaaaatctgccactggaacgctatcgtaagagaccagattaccgttataaaccacctggttatcaccggtattgctctcctcataaccattgtttaagctcaagttgcccttgctcttgatatagctaaagacaatttgtgggttaatatctacctggcggatatgcaggggttcggccagttcaaaactgaggctgaagctatgcgttttggttttgccatcgttgttatattcagtaatggtggttttagtcgcgctgtcggtacgactgcttttgctgatttgatcatgcgcttcacggtaaacatagtttgcacgcgcaataacgttcttaccgattttctgctgcaatcccattgccagttcatcgttataaggcgttttcaaatcctgataacgcgtcagagttttattaccacttacgctttccgtccagctattgcggatatcacgtaatcccatatcaagaatattcccgccatagtaacggttataacctgctgtaatcatactggtttgattagcaaaaatatcccattccgtcataaagcgcggggagatattgtggttactcagatagttgtcatagtcataccgcacgccgggcattaaactcacattacgccagctaatgcgatccgccatatacagcgtgtagttgtcaattcccaggcggcctttacctttatggtaaatggtatggttagttttctttccggcagcattaatcacataggattcagactggttatggcgttcagtccacgcatcggaatagatgtattccgcgccgaagtagggttgatggctaacattacccacggcgaatttttgccagtccaggcgtgttttgaaggtgtaattatctacagcctgggaaatgtgtcctaatccgccacgggtgcaacgccctgtaatatcaccatatgtacaactaagttcggtgtaccagatgtcatgatcgtgacgggtataatcactaatatgatcccaaccaacggtggtacgcagtttggcccatgcgagctgcgtatccatatcccatgccagaccataggatttattacccatttcgcgatcagactgcgggaaggtgctggtattataatcacggctggagccggtatattttaaggttaaatcgtgggtaaagcggtcgctggcaaaccaggtaaatttgcttaatgcagtatcgataacgtttttatactgtgcccgaccggcgacaatgccgtcattgctaacataatccgcgcgggtgatatcagactggcggcggcttaaaccggcggtaacgccgaagttatcagcgagttcctgattaaagctcaaggtataaaagttctttttaaaatctggggagtaataagtacttccactagagccttgattaaatgcgctcttgttattctcatcgatatggcttgttaaccagtcgctacgcgtagtgcgataacccaatttcaccttgctatcatcagcgttgaagcgtttgatctttgcatcaattaccccgccattgaagcgaccaaattcaaccggcacaaaactgtcataaagcgtcacattgtccagtaagctgacatcaagataatacccctgactcatcccgctaatattggttgcactactggcatcggactcattcgctgggttcaggttattagttgcactaataccgtcaatcaaataggcattctggtaggggctcgcaccgtgaatagagattttctcagggcgaatatctccctggttcaagctggtactttgcgtactatccatgcgtaccgcagggttggttctcagcagatcgctgatattgccattcccggtcggtaaacgctcgatgctttcactggtgtaatgcgtgttgccgtttacgggtacagggacaggagcatagaccgtcatctcttcaaaaaaatgcatgtacatgtttttgtcatcgacggcctgcgccacatcagcgccacataaaatgacgccaggaataagaactcgcttcatttatttatatctccgtacagcagggcttttattgtttttataaaaccgcgctaatgtcacaaatatcatcggccaggttccagacaccgggttgatgtgtaaccataatgacgccgcttgtgggtagtttttcacgcactaaacgcagtaagcggatagcctcttgttcctcaagatgagaggtagtttcgtcaagaaatatccatttcggacgtcgtaaaattaatcgtgccagggcgatacgttgtttttcgccgctggaaagaatatctccccagcgatcgtggtcatgaatacgcgcagccaatttcccaagaccaacctgatgcagtacttcgctcaagcttttatcgtctacgggcaggggaagtgctttacaaataatctctttcagtaagccggttttgattaacggtgtttgactcacataccaactgtcagcaggagaagaaatatcacctttaaaccacggccagcagtgggataatgttttaagcagtgtggtttttcccgcgccagagtagcctttcagtaatagccatttgcctgggctaacatgaaagttcaggttctctaatatgatcttattatcaggcgtacgaatactcgcatcagccacttgtaccgcatgttggcaatttttaggcttattcgtagggcgctgttcagtgagttgatggaactcatacaagcgatcgataaccgcagccagttcagcaagttcgtcatatttataaataaaccagcttaaattgttgcttaccagcataaatgcctggcggcttttcatcagtccgcccagattgatctgcccgctaataaactgcggcaataacagaaagtagggaagaacgctaaggctgcggctataaatattctgccagtaatcaagccaccgctgacgattcattaaacgatgccagttctctttaatggtatgaaaattgtcgctcaactcctggcgttgtagagactcagcattgcttagcgcaatcagttctgcctgcttattatgctgcacaagatttgttcgaaatgtcgcttcgctacgttgtttttccacattaagcggacgaatacgtttacccaccttatgggtaaataaagttccaccgatcacaatgagcacgacggtatagaccatatacccctggatattccattctgttccaccaacagtgaaactgagcgtacccgcgctttcccaaagaataacggtaaaggtgatcagcatgctaagactctggatgaagccaaaactaagactgagcgttttgctgatcagtaagagaatgtcttcagcgatacgttggtcagggttatctgtatttttatgctcgccgtagatctgcgtgaagtagtagtttttatctgcaaaccaccgattaaggtagtaatctgttaaccattcgcgccagcgaatagtcagtagtttaattaaccatgttttgtttacggatattaatacaaagatccccagcagggcagggaaccaaaggacaagctgccaaagcttatcggtttctttctggcttagcgcattgaaaaaatcattattccagtcgtttaaccagacctgaattttaaccacgccaaggatcatggcgaggataataatgattaacaacacactagttttattattcttacgcagccaaaagggcttcaacagacagagatactttgctatcaacatacgaagcgtaatgggaatggttatcattagcgaaaattgattgtgccatccaatgattatctatggcaatgatttactgatgaaatttatttaagtatcatttaacaatatgaaatataaaggaatatttcattttcagtggttatggttatgctattgataatcaaggatattgctaatgccctgatgcataccacgtaagccaggattttcgcaagggaagatgatgatgacgaaacacccgacaggaatttatgtcgggtgccttgttaaggtcataagaaggaggctaagaatggagttaaaagagagcgttattaattattctccatttgttttgcaacatccataatgtggtaaagcggtactctgttcttagctaactctaccatggcgttcatataaggtaccatggtactaaaaaggattttataaccttcgcaaaaataagaaacagtctcattgtttactttagtaatacgatgcttaggacaaccgccattgcagataggtttatatgcacattgctgacatttcgctggaatccgttttttttgcgctgtcagttgtacactgttcatcgttttgagttcagatttattaatgtttccaattttgtactgtggatagacaaaatggtcgcattcgtaaatgtctccattactttcaacaaccagattatccttgcaggactcctggaaaatacaactggtatgcccattccccaaaaaacggctgacaaagctttcaaactgacggatgaaaatttcacccacatcgtttttaacccattgcataaaaatggtactcataaacttgccataagccgtgggaggcacagaaaaatcaatgatacggaatgtgttctcactatgaccactgaaatcaatattcggcgtcccggtttctagcaattcgataaattgcatatgtttactgccgatagattttaaaaaatgataaacctcaagagggtaatggacattaacgttattaatgacggttaacgtattaaactctacttgataacttttcagacgctcgatggctgctatcacttttgcaaaagtaccgttaccactattactgcgtctgtaacggtcatgtaactcctgggggccatcgatgctgataccaaccagaaattcatgttctttgagaaaggcacaccattcattattcaataaaatgccattcgtttgtaatgcattaaaaatacgtttttggcctgcatagcgttgttgatagtgaataactttacggaaaaaatccaggccagccagagtgggttcaccgccttgccaggtaaaatagacctgattgccagacgctgcgatatattgtttgatgaactctttcagagtgctgtcatccatccatttttcatgagtaaactggctctctttttcaaggtaaaaacagtaatcacatttgagattacattgaaaactggagggcttggctgtaacgtgcatcgctatctcgctcaataaggcggcggaaaaatccgccgcatgaaggtttagttatttcgcttcgcttagtgctttcttgatattgttaaacttctcctgatttacctcgctaagcggtggctggctgctgtcgataaactctcttaccacgccttgcatctctttaacgacctgcggattggcggcggcaaggttatctttttgctgtagatccgtcagtttgtagagacctaactgattgttttctactgtatagacaaggctataatcgttatttctcaccgtataagagaattggcttaagtcctcagtgttggggttatgcgggtaatcgtcactctgatggcgaacaaatttgtggtaattatcccagaatggaatattttcctcgtcaaaccagtgagaataagaggttatccaggtcagatttttatgtggctcgccttgtttcttatcttgcaaccagggcagcaaggaaacgccatccagcttaaggtcttttggaatgctgatatcggctgcatcaagagctgtcgggtagaaatccattgcggaaatcagcttgtcataattaccgggttgaagttttcctttccaccacataaacattggggtgtgagtaccgccaggataggtctgactcttatagcctttttgcgccccgttcagcggcagaggaccatcgataaccgcaccattatcggaggtaaagagaataattgtattgtcatactgtccgtttttcttcagttgttcgagaatgcgttttacaccctgatcaacagaataaacggaagcgtagtagttatctgctgtttgactaccggtattaaattgcttctgatattgatccggtgcaggattatcatttggcaggtgcggagcattataagccaggtaaagcataaaaggctggtcaagtgttttggcacgatcaacaacgccaattgcctcatcggttaactgatcgctgatataaccttttgcggggacacgttcacgatttttgaacagactaggggagttgtaatatgccgttcctgcagcgtggaatcccataaagtaatcaaagccacggttttgaggttgccattcttccgcagaaaatgtggtgaagttgtcatgatagtcacgcgtttgtttatcttccggtaccggcacattactgattttactcaagtgccatttacctactgctgcagtgtaataaccatgattctggaataattcaggcaagaaagtttctgttagcggaataccatcctgagcatcggtattggaatagacaccaaagcgggcgggagctcgaccggtcattattgcggcgcgggaggggccggaaacaccgtgtgccacatagccgttagtaaaacgtacgccttcatccattaaactaaggagcgtcggcgtacttttttgtgcagcttcaatggctttatctatccctattttgtaggtatcgacaacttcacgattttccattgtttttgggtcaaaagatcccttatcaaaaggaagttgtccataaccaagatcatccatggtcagtacgataatatttggctttcctttggtactgtattctgtcggcgtaaagtcactgaaagcaacgtttgttttggttgctttcagctttacatcatctgccgcatgagcagcaaatgcagccataccagatgccagtatcaaagatatgctggtacttacgacacttttctttaatgcagacttcataaatgttcctcttcttattgtacttaattccaaagtaattttacgaagagaaataagtggatgtaagtgaagttagtcacataaagagatagcagatttagctaaaaaaagggaaaaaacagtccataaagcgttgacattactttctgttctattaagtaatttctcgccgataaacaactaatttattgatatttaataaattattgcattttactgacaaaatgcagaattgagatcataaataatcatgcaacaggttatgcaagtgcataaatatgtgatggatgtcacttatttatttcaataaatatatcgcctaaaaacaacgcggggcagggaatggctgccccatttaattcttacgcagcgtgtgtggttgactactcgttagcaaataatcaaatagctaaagcattcatcgtgttgcccgtattcatacccgtgtgactttgacaacggtactccttagaaactctcttcggactgttgccgaaatgtttgcggaacgcataaataaaataagatgtactggcataaccacattgttcggcaattttattgacactaccttctacgcgtatcaaattttttgcgtgctgcattcttgcatctaaaagaatctgactgaatgtcgtttgctcttgcttaagttttttcttcaacaggctttcactgatgtacaggcagtcacaaatatctttcagcttccatgggtgcgccggcttcatgttgacaatatttctcactttcccagaaacggatagcacaccgttagttaatagtgtaatgaaacctttgcatgcggcaaaaatagacaggcaagaaaaaagcaaaagttcactaaaattatgatgattgcgttcttcgctgttgagataagcaatcatttcattaagcaatccagtcggtacattactagcacgtaaaaacttcgcaggaacaggcaccgtcactgtctggatgttagtgcattgtagatattttttaatggtattttcagtaaatccgatctctttaaaatgccgctcataaggttcaaaatgcgtacgaacagcgttatctaccatcaggatctcgccgtcagagaaggcgtaatctttatctaaaatgttagcgttgaaggcatgatgaataaatataacagaacaaacgaggctcattttatctccttaaaacaataaagtttttatcgatacttttttaacatttcatatttataatttgctgtttgttttcagccttgcaaactattgataatgaaatgtgtaagatctcttgcaatgcgacccatttctgaaatactcagctgatcaattgccgaaaaaatggctatcaacgtaagtgtcagtaataagacaaccacaattgcagacatgatttctttatagttgtctctttgcgtgattttgtttttcactgtggtcgcatgcatttcaaatatgtttatttagcggataacgttaaaaatcgttaatcagtatgcttaatataacaggctggagaaaagaggaaataggactggtgcttcagtactgagcggagtttcttacagctgtaggcagaagtttatatcttatagtatgtagtttaatttaatccatgtgagcaaattgcgaaataatagtcaatgaggaattcttctgctgtgcggatgacagcagaagaaatgagaagaggcattaattacttggttctaattcaaccggaatacttttatagccaggaatgccacttaatggatcgtggttatcaagtgttagcatgtgattgctttctggaaaataggtcaccagactgcggtcagccatagagtaaatgaccacttttaatctatccatgcggcgactgctgcgcttaccgtctggcgtaagcgcaataagattaactctttcgccgttttttacacggcaaattttagcttgtttagcactcataaagaccacatctcgttgaccgaatacccctcgatagcgatcatccataccataaatcgtcgtgttgtactgatcgtggctgcgtactgtcgccatgaccagcttactgttaaacgcactagagggatcttctaacagccctttgctggtaatgaaattagccttaccactcggcgtcatccagcgcctttcagcagctgcatttatcaggtgaaaaccaccgggatgacggatgcgctggttatagtcggcgaactctggcagcacagcttcaatgtcattgcgaatgcgatcataatcttccaccagatactcccaggctaccacgctctggggtagtgctgcctgcgcgattcccgcgaccactgcacactcacttttcagcattacaccggcgggttttaacacgccacggctggcatgaatcatgctcatactatcctcaacggttaccgcctgcgcaccgtttttttgcatgtcaatctcgctacgtcccaggaccggcagaatatagctatgccgtgcggtcaacagatgagagcggttaagcttagtggctacgtgtaccgccaaatctaattgcgttaacggtacagcgctcgcttcccgatctggcattgccagcgcaaaattgccccccatgcagatcaatgctcgagcctgccccgtacatattgcttgcatgctggcaattgcagcatgtccaggtgcatgaggtggggtgaagccatagcgctcacccagacgagccagaaactctgcagacggtttctcggtgataccgacggttcggtcgccctgtacattagagtgtccacgtagtgggcagatacccgcaccaggcttgccaatgttacctttcatcaacagcagattgaccagttgctgtacgttctgggtaccatgttcgtgctgagtgatccccattccgtaacagataatggtgcgttcggcagcggcatatgcgtcagccagttcggcgatttgtgtctgacttagtccagaaatacgttcgatatctttccactcggaattgagaacgtcacggcgtagctcgtcaaagccgacggtatgcgtttgaataaactcgtcatcaagcaaactaggccgacctgcggcgcttgcagcatcatcgcgctcaattaacaggcgcatcatccccttgagcaacgccatatcgccaccaatgcgcacgttatagtaggcactggccaactgagtctcagagttcgtcagcatttcaaacgggttttgcggtgcggtaaatcgctccaggccacgttcctgtagaggattgatggcgatcattttcgctccccgtttcactaaagcgcgcaagctagtcagcatgcgagggtggtttgtaccagggttatgcccaatgcaaatgactaaatcgcacttctcaaagtcttccagcaacacggtccctttacctacaccgatactcgctgccaaacccacgcttgtcggttcatggcacatgttggagcagtcgggaaagttattgctcccgtattcacgggcaaaaagctgataaagaaaggcagcttcattggaagtgcggccgctagtatagaattcagcctgattgggatcactatagctttgaaggcgtgcgccaatttcgtcgaaagcttgttgccagcttaatggcttgtaacagtcgctgacggcatcatatttcaaaggctgagtgagtcgccccgcagcctcaagctcgtggtctccccaggtaagtaaactttgaaccgtattctcagcaaagaaagaggcgtttacctgcttatccgtgacttcccaggcgattgcttttgcgccgttttcacaaatgtcgaaactcgcactgtgcttaggatctggccatgcacaacccggacagtcaaagccctctggcttattcatgtcaaacatggcaataacatcctggcgtatatccatctgcttacgtactgcattcgctacggatttaacagcaccccaaccacctgcagcaccctggtaggattcaatttttttcttcatctacttatcctgtgtggaaatgaattattaggatttgtaatagcgatgatgcacagtacatacaaagggattatcgccaacatggatatataagagtaggggactactctctttctatttttaatctattatcgttaaacaatagattaaatacgataagttaagcatcatctctcatagtgtttaaattaacatatttttcaatataaaaaataagactctggcttcaattgtgcgcggattttcttacaggtgtaggctaatagccttcacaaaataattatccgcgcaattttcgtgaatggagcgcatagactaaggtcaaaatcacaattattcatagataaaagtgacaccaatgacactctggacggttccggcactaaccttgtttcctgtttgtccataggttgcgcttaaacccagaggtactttgcttttatttactgtccccagggagacattttctcccgtagccagtatttttccattacgcattagagtgacacccactccgcttgcttttgttgcatcaggtgctgtgttagcaaacacttgtcggctactgtcagtggtggcaccgctaagataaaaactgagcttttgttcgctactgcaatatacgccaaggggtatttctgcgcttccaggaaagtccgggagatccacggtgacatttcgactatcaacggtgcagccgcctgttggcataacaacattgttattactaataatattccacgtaaaattacgcggatttccgcttcctaatgttgcaattttatacatatgaatacgggcaatgacttcccccgcttttatgacaactccaccggccgccccaactggggtaatatagagttttaacggtaatggcatcggtgtcttatcaccaatatccaatacgttggtatttgtcgtcaacgggaaggggtaggtcacattattccagtacaggcttcctttataactctgtagggagcctgcgaaagcactgccttgtaccaggtttatatgatcagtgtcgtaccagccgccgtaatcattccagcaacttatatgctgagacaagtctacaaccagattctggcccggctgtattacagggtcgagattaacataaacagaggttgtacctgctccaatactactcccgccatcgacattacaactgaaggcaaaaactttgcctgccattaatagaagataaataccgaacaggacctttatactgattgttttacccatgatatatcctaaggttaaaaattgatttaaaaagaaggctaagaaaatcgaatcgacgttattgccaggtgtagatcacattgattagcgcctcgatcgttccctggcttgcgtttccattcaccgtgatagctcttgccttaagtggaaactgtgcattacgagtgatctcatcaacaataaccgttttgctatcgccattttttaacgcagcatcctggtcatccctcagctctatctgaatattttcggcagtaccttcatttttgtaataacccgtattgtcagtactacctgtcacgattgccgtcactgcacttgtttcaaccggacaatcggttaaactcaaagtaatattgtgccagccagatgcagaaccaggttgttgcagattgcgcgtataaagatccccgagattaacgttagcttctttggtttgaatagtgcagggtttagcgactacccgaccattaacagtgatagtgacatcggcggcctggagagttgctgtgaataacgcgcaaaacgtagctaacaggaacctcttgtgaagtcttttcatatctgactctgattattgaaattcaagggtaaaggttgcgctagccctcaccagtcccggattgacggacttctgagtactcttcagacgagcggagtaaggcaaaatattgttctgttctggtaccagtgggatccactgcatcccggcatgaagatcattcagtttcaccggacgcatatttgcgtccaatatttctatacccaaaccggaggccgtattgcttccttcatccagtttcaacaaagtattattttctgcatcctcaataccgttaaatgcaacccgaacccccgttgtccctttgctgcattcacttaacgtaatctgaaaagggacggctggacttgtgctaccggtcgttggaaattgtctggcactgtttttttggagatctacggtaaaattaaggctatcgctactgactgtgcagccataatcgaggacgcgcccgctaattttaataacgctatctgcggataaagcagaataggtggttaaccccagacataaaccgaggaaaataatgttattgtatttcataatctattgttccttagcgacagattgctgtctgctggttcagtaaggtaccaggagaaacttcaggaagcttgtactcgacaatacagttactgtttttatctttgccccaactaacctgtaattgcccactctgtggaagtccagtcagataaacctgaccattttccgcgacaatgctgccatttttattctctccgtgtgtgacaattgcaccgaatggaacgctcttattaccgtacttcaacgtcattaatactttcccgccgatttgtgcattaaatgttgctctggcaatagcaccgtgagttgggatgacagtgaccacggtttcatccagttcaacattatctgcaagggaattcgcgttaagagcaacacggttttctctatattctgtcgcaaatggtaatatggcatagccacgccagtcggtatgaattccggtctggttctctattttgacattatcagcaccaggagccttaaccagaaccattgtgtcgcccagcggctgtccaaaggtgatgccatcagcatgagcaataatcccaccactcattccgtaataaatctggctgctgtcaccactccgactgtaaccgacattagtattaccataagctccacgataattaagagaactgtaaccactagtgccagagcttgtattacctccgtgggtgttaccgacctgaacgctataattcaggttattatccggcagcagagtgccataaaccccgcttagattggtcatgccgcctttcaaatcgttactcatactgtaactggcgttactattacgaaatgcgctctgactgtctgtacgcatccaatgactgaagggaacattaagcgtaaaagcgagtaaatgatcccgatcgttttgccatatattattggaatagctgtaattcaggctagtcgtaatatcaccaaacggcacatttaatccaaaacttatttgctggtcgctgcgactcgtgttccagtaactttggcgactggcactgaaaaatgtcgtaccgtaatttccaagctgctgagagatgcttatttgttcctgaccacgcttactgtagaacagattaaaataatcaataaattgtgtctgctcattggtgtctccggtaggaggcttgacggtgtaaccactcattcgactgtaggcactgtcggataagttataaaaaccttgcgtagaatagcgatatcctgcgacctggatattggttccacaacaagtttattgctgcacttgttgaagagagtatttgcaaaaacattttatgtcgctaaataacatgacgatttcattatgcatgttatttataaaccgtgactaaacagaatattattgcgaacaagggaagtgtcaggaaaggtcaagagctaccaatggttaatatggctataaatcattagctatggttaatgtttgcttgctgaaactaacaccgaattgctctaaacagataagtgcagggtttattaaagctgtccgacagactttcttaacctggtaatatctctcttgggtgactctccaaacatccgcgaatattcccgacactaatgggatagctttcgtaaccgacagcataggctgctgtggtgacatcgtaatgttcattcagcatctgtcgcctgacttcattgagacgtagccatttctgataccggagtggactcattcccgcttgatccgtccttaaataagtaacagcaccctctggtgttttcgtatgcagtgtctatgcgacagacactgcgctcttagcatggggcagggaataaccaggctatttctccatgcacaggccaattatgaaagaggagaggcttaagttcttgaaccctgaacgaataacgactaccagaaaagcacttcgcatcactcagacatgatttaacataatatacattatgcgcaccaatataaaccaaggaagaatccagtcgttggcggtcatgattgtcatgctcattaacaatgaccaaaccccatatctcacttactaccgtattctcggcttaaccgtccatgcaacctcaacacattgctttcaactgccgtcaccacgttctccggaaaatctgtcggtaaactagtcttcacgttatccagtgctgctggaatcattctggcaaagtcactcaggatttcatgcatctgcacttccgggaatctcagcacctttgctgtcgccaaaaaatgtcgcggataaattttatcgattgccgtttttttgcctttggatgcgttaagccccattgccagtttgagatcgctgatgtgtattcccgtaccgccaaggaccggaaatgcactaatgatgtcgtaaaatggcgtgagtcgataactgccgccagcctgaataaatacggagaagttttttgcatgaccgtccgttgcgccaatcaaccactggaagacctggaatttcataaaatcatagcgatctttcagcgcctcgctggaccccatcaaaaaagccatgatccgcgcgatgcctgggcctccatcactttcatatttcacgctactaggtaaaccgaatgtctgacacatatcctcctgtggcaagcgaagtaaaaccgttcgctcagcattccaacgcctgtcaaagcgttcgaccgctaacgcgcgcacatttcccgctttaatgatttctgcgtccggaacattcaacccaagttctttcgccagcagcagacagtaatactcattatcaacgctttggctgagatcgagcgtcgcattgggctgcctgatttcgccaatcggtaatttaatgatgtgcgtcgtcggcgttattcctttcggaatgcaccagtcattgcctattctgagcagtgctgtcttctcctgtgcgccagcaacgctgatgcgaaagtcattttcttctctaatcatgcctagcgggatatctgctttataagccgttaatacttcttcaagtctggcttcagtaagcttttcccatgccattatcggatgcgttacggtttcgtcttcgggtattaacgtcacggcaccaacgctgtctcgccctatttcactcaataaatcaaacggttgtctggatttggcatgataacgtttaacgatccggtcacgtacaatcgggctatcgggtaacaggttatcgaagaagttaaatacggcatcagaggtgatattccccctctgcaatggcaggctaagactcaacggtctggcataacggcttgctaaccactccggtgcatacttaaaggtgtgcgcgccgttggctaacttcgttaactcgcctacccgctggttgttcatccaagtgacaagtttaggcattaccactccagattttgctgttctgtactttctgggctggcatttttcgcgtcgcatagcgtcatactgagttcaaggctctgtaaaatcttaaaaaatgtcgtgagcgtggtattgtcagggttgttttcgaaattggaaatcgtcgcctgcttaataccaatttttttcgccagctcgctctgcgtccagccattttgctggcgaaccagtttcattgcattcgccaattgcgttgggctatagatcttctgaaagctcatcatgtcatacgtccacagcaagtttatccgcttaaggggatattataagttttatcctttagtgaggataagtcaatctggaaacacatcttatccgctctacgggataaacgctgcgatatccgcgatcgcggataaaaaggaggatttaaataaggcgttgatgcgccgtttgaagtcggcaatattaagccgcatgccatctcgacatgcggcttatacggtttaccagctatatttcactcccagcatgccctgagtatcgctatagcctttatcacctagttgcacaccgacattcccccacaggctaaggttgttatttactttcgcctcaaccccggtacgtacttcaccgagattacgcgcaccttcacggcctacggtttgaccattcatcttcacggcgtagactttgctattgttgatccagttcgcttcaatgtaaggctggaactcacgctgtttaccatcgtcacgctggtgatggctgttcaggtaggttttcaccccaagtcgcgtttgcacatttccgtcgccttccgtttcaatgcgcgttccgtctttccgggtatggtcggaatctttcacacccatccaggtgatttgcgcctgtggctggacgtaccaggtattcagcgtcccttcgctgccgctaaatgttcccgcttcaaaggtatacccaccctcaacagaggccgtcacaccgcgagaatcatagtcgtcagcagaacggttatcggaactgacgctgttatcaaaccagttatacagcgcccagctgtcaacataagcgccggtcttattcgcatcgttctgataccaggtcgcgtacagcccagcgctgtaaccgctgatgcgcccatcgcttttataacccacacgattactctgagtattactgtgctgattggcgtagcctgccatcacgccaagatgccagcgatcctgcgcgttgctactccactgcgccaaatcgccgcctagctgcaatacatagcggttagcctgagtatttagctgaccgtcaccggccctactacgttcgtgccctccgacatgacgcatccacatactgcttgcgctcccctgagaatgcagactatctgtatactgcggctcacccagacggtcgtgtaaacgatggctaaacaggctgttggctgcggcaatgttgctgatatagcttccggcctccgggcgataaacacttgggccttccggatccacaacagggggattattgatgggatcgggtgtatccgctggcgttacgccgtcccatttactggtcagataccagtttttctcgtcattccccttccctttagccagcgtgtagacgtaagccccagcttcgacagttccggtggtcagcgcgaagttacctgcagaattaccgccaacctcaatgagttcaataccgttgaccgtttgtgcaccgacgccgccaatgttatcaacccgaacgcgagtgttcccttgggtatcgcctttcacgttcatcttatcggtggggctattatcgccgcccagcgtcgcgttgaacgtcatcaggccattgtttccggtatagttgccgttaacggtcagtacattccccggtttccccccttcgctattcatttgaaccgtgccgccattctccaggttgccgccgatagtggttttagcgacacgcagtgccccccccaggcataacgttcatatcacctgcagtggtgacatttccgctcatcacaccgctgttatggatattaatgtgttgacttgccatattaatggcagagtcggaaccgaaagcaatttccccccccacgatatccgtcgtaccctgatatgccgcggaatcgttgttaagagtcaggatcccggtacccagttttgtcacatcaccgctaccgctgatactgtgcgtcatcgcccagctacgctcagtggagatggtgagcaggccattattgataacggaagcatcacccaggtttttctgctcgttgacgctgagcgcgctgcctgtatcaatgttgaattgccccacaaagcggctattatcgccatccaactctacatctgtcctggcggttgcgctcacgatacccttcccgcttatgctattacgcagttcgccagtcacgttttttagcgttaacagaccgtcattggcaatatttcctctgcctaacccctgagtattatcgaggctgacttccgcatttgggctaatgctggttaacgcattgtagcgtgcattaagcccctcgatagccagcgttccccctgtaacattcaggtttccgccacctgtcagttcaccctgactgatcccacctttatttaccgtcagcgccccctctttgaacaaaacagtgctacccatctgcccggtgaatgtctctaccgtctgcgtgcttccattaagatcgacgatggccgcgttgctgatgttcagttcccgggtgttgccaagtgcaccatccgcatcggtacgtaatgtccccatctgaacgtaggttgccccctgatagtcgttctgaccgttggaaaggctaacctgtcgcaccgtattgattgccagatccccttcaccaccgatttttgcgctcatatcggccgttgcgccataggctccgccatgttcggctaacgtcagcttttgcccaccatggatgttcagcgctttcagcccatagttaacgtacaaaccattacctggtgcggtcgtgaggcggaatccataatcaccctcggcgaccaccgttccgttttgcgcaatgtgtaacgttttgtccgcttccacctcgtcgccctgtaaatcacgtaacgttaaactgccaccgctcccaataaccgtttgcgccttcaccagttgaacgccgacatggctatcgtcgtgttccagcaaattgagcgtcgtcagagggttattcgccatgggatcattccacggtttaggcacgtcgataagcacgtcgcccgtcccgtttacctgatagttacggcctttccaggtgtagtcacccgcgccgacaaccagcgtatcgacgctgatatatccctccgcgagcgtcgcagcaggaatatccgtatcgaaaatgatggtacctccattcatggccagtccaccaatggattgctctccaacttttacgcttgtggtattttcactgtcagactgcaacatcgcgtgagtaagcgcagcggtgttgtcgcgttccagagtgaaggtactgtctttcagttgggcaacaccggcgaattcagtccctgttgcatgggtaaagccaaacatcttgtcggaggaactcagctgcactcgcatcaagccatcgcctttgagcgcattggtcagcgtgtaatctcctgcactgttcgtacttgcgagaatgtcgagcgtaccggggtttgcaatggttacttcactgctccccatgcccgttaccccatctgccgtatgagacgcaatggtcaggaggccgtcattgaccagcgttttaccgctataagtattccctgcattgaacaccgtatggcctgcatcatggatcacttttccgtctttatcgtcacctgtaatcagcatatcgacctggtagccggcatcactgttattggtatgattaaagacaaaaacgccttcgccaagaccaaactccactttcgtcgcattggtgataaatccggcatctgccgccgcctcaccgtgagcagcaccaatgtttagcgttcctacagcaggctcaaaaacacctaagtaaacttctccaccttcgacattcagcgtaccgttattcgtcagggttaacgtacccgtaccagatgtccctacgtacatattgaatgtttcaagaagagagttctgcccatccaccctcacgtcgcccttacttttgtcattgagagctatctgtgtatcacgcgctttaactatacctccggtggtaatattcagttcacccgtgcctaatacaccgacctgtagcaattgtgcgttagtagaacttgtctttaaattccagagactgtccgtactaatattaactatccccttaccggaggcatttcctccgataaatccatagcccgtactattaagggtggcaccattactgacatttacgataccgctaccaaaattaccgacattgatacccacagtatcgaagctacttgtcgcatccatcaggttcagtgtgccgataccgcttgctttatcgcccaaaaaagtaatattttggcttacgaacttaccgccatcgctaatattgaggtttccgacgcccgcaacaccaatggtggtatagacattcttattgacctcccacattccccccgtggtgatgctgacattcccgacgccggtttctccataaccgagactacttcctccgttgctgacaacaagcccctgattactgatattcatttcgccgtggccgtcataaccaagattagttccgagattagtgataacggagttcttatccttaacagtaatgttgcctgtgcctgtttctttcatccccgcagtgataattccgctatctactttgccttcactgctgacattaagttcaccgtcgccagcatcaccgatatagatatagcggaaagcttcgcccgttccgaggaaattccaatgccctttatcggtcacgttgacgacaccgtgggaaccgtcctgaacgcccaccaaactatattctttgttattaatcagtccattattggaaatattgactgtgccattaccgaaatatccattatagagtctgcgtaccgtgatgacagagtcttgatcctgcacattcagggttccgataccggtggcattgccaccgataatcgtattttcagccgtaaccaaccccccctcgcgaatagtcgcctccccagttccttgattaccaatttgaaattcaatactggaatcattattttttattagccactcgccacccttttcaacgacaacctggccattactgcccgcctgatagcctaaaatggcgacgatactactcgtgacgtaacccttatccgtaatatttaaactacctgtgccatagctacctatttcgaataattcggtcgtcagaacagagtcctctccctcaacattgaccgtcccgacgcctcctgtgctagaacctaatcttaaatagcctccatcgacgtgacccttctgtttaatattcagcgtccccgttccggattgacccacatttaaaggccttgcattatttccgctatcatacaatcgccaggtgccacccaaaacattaacggtgccctcactgtcctcattagcgccaatgacgctggtagtaatagtggttaaggaggcattaccgccagccaaaatattaagcactccagtgccataccagccaaccaggtaggcatcataagcaacatcagtatcaatattggtaatctgatcattatcaacttccagacttgcaccagacgcactaccgcttagtgccagcaaaacacccagcgtcaatctactgaatttcgttgtcagtccagaggatttacgcaaattaaccgtgcttgttttacctgccctgcgagttaattcgctgcaggcctgaaatacctgtagagtgcaattccatatcacgcgatagattctattcatataaacgctccatatacaaacaatacagccacgaaagagatgagtcgtcagacattaaaaatgaaacttattaaattgtcagaggtctgtattgagtgttagttggaggtgggaaggtgtcaatttggctaatttgctaatgctttcgaattgatagattaaaaattgcatagttcttattttatttaaatatgaactatgagttattgttgcttaataagaaaactgtttctttcaataggaaaattatcatcatcatatttaacaaagaatagcactaattgctaaaaatcgaagtttattaaaccccttttgcatccattagtgtctttaggaatattcgctataaaataagggttgtgcttaatgctttaagaaaaatagcaattttcccttgaatatcgtactggtgatggaacgatgaatctgcaagctggcttttaacaagccagctctaaaagaagggaaataagaataactatactcaaaaactaacagccacggtcatcatgatgtggctgtcaatgaaattataacccaggcgctttccataagctcgtcgtcagtccatgatcaaccagccccagctgatcctgataaactgcctgccacttatcgcgactatcctgataaagttcatgcttttccgggtctggtgtgtgcgtccgttcccagcgaaccaggcgttctccggtttctgccatactactaaaaattccggcaccgacgccagctgcaatggcacatcctaatgcagtggcttctttgaccaccggaatattgacgggtaatccgctgacatcagcgagaatttgactccataatttccctttactacctccgcctgcaaagactaagctactaggatgaatattgctgaaatcagcaatttgctgcaagttacacgcacttacaatcgccgcattttcttccagcgcacggaacaatgtcgctttgttacatttatccgggtcaatggacaagttaataaaggaaggcgcagcgtgataccaggttttaaagcgcattctgtcggagaagatcggcattacgccccagctcccaggcggcacccgactggccatctcttccagcagcgtataggtgtcgatgcctaaacgttcggcaatcagtttttcttcggcacagaaagcatcgcggaaccagcgcatggtgagtccggtaaaaaagcttatagattcagcttgtaccatgccaggaataacatgaggattaacgcgcacgttcatttctgggtctgtcaccggcgcggctaaatttacaacttgctgccagaatgtgccgccaagaaccgcggtttgtgccggacgcacaacgcctaacccaaggcaaccaagctgcacgtcgcctcctccaacgaccaccggagtgcccgccttcagaccgcagagttccgccgcttgactacttaccacgcccagcaatgtgccggtttctttgacaggagaaagaatatcggcacgtaggccagccatatccagcaatgcaggtttccagtcacgggtggttagatcaagaagtcccgtggtgccagcgttagagggatccaccgccagttcgccgctgagcatataggccagccagtcgctgatcatggtgatggtacttgcctgacggtaaatatcggaacgatggtgcgccagccaaagtaatctggggatggcacttaaagccagtgtttgtccggtcgcgcgataaacttcgttttcaaaggtattgttgtgcagttctttaagttcgctaacttcgcgtgccgctctggcatccacattggcgcaggcccagatcggggctccttcattattatataaaacaatgccttcacgcatgctacatgcgctaacggcagcgatatactccggggctatgccggcgttgtgcagcgcctggcgcatacactcacacgccagttgccagtttttgttgagatcaaattccatagaaccaggaacgtccggtactgccagatgccgccactccgcctgtcccactgctatttgattgccttccaggtcgaatatcacagcccgaatacttccggtgcctgcatccagcgccatcaggtagtacttactttcactaagggtaaagagtcgagccattagattatcctcggcttatgcgttctgtctgttcctctatacgttctccatcattcccggtaataaggtcatgcaaatttaactacgtaaaatcgccgctgctgtgtcctgatcggtaaccagtgcgttgatataaccgcctttcattgcagcggcaattgcttcggctttattttctccccctgccacgccaacccggacgggtatggtcttcagcgcgcttaaaggtaagccaatcagttcgttatgtattttgatattcgtgacaacgtcaccttttgcatcaaaaaagtagcctaaaatgtcgccaaccgccccttttcggccaatcattaactgttcgccctggctgatataaccggagcgaatgattgtcgcatcgtcctgttgactcacagcaccaatgccgacaatcgccacatccgctgcttgcgcggctaacagaacatctttgacgcaattttcattttttagcgtacgggcaatgtcagcggaggatgcccgcaacggagccggaataatattcacactgcacgccgcgttaagctgcccgattcccgtcatataagaaccgacgccaccggagagcgtgaccaggcgaatttgctgactgctaataaaaccacttaagcgttgcagcgtattcatggttgcctcgccaaaaccaatcgccagcatctgttgtggttgaagtaaactcatcaacatatgcgccgcgcctatccccagtcgcccaccgacatcagcatccgcaagcccagggatcacccggacatgttgcaggctaaactgacgacgtaattgagtttcatattccagacagccttcaaagcgagaattaatctgtacgcgaataatgccggactgatgccctttctccagcaatcggctcactttcaaacgtgtcaggccgagacgatcgctgatctcgctctgggtcagcccgtcgtgatagtaaaaccacgcgatccgcgcgacctgttcttcttcacacattccctgttcactaattgcgctatcgttgattgtcataattcattcttcactttgaacatatttaaatctttaatgcaattgttcagttcttgctcatttatatctgtgatggcaaccacagtttgactctacgagcatgaacaaacgcaaccgtgaaaatcaaaatagcataaattgtgatctattcgtcggaaatatgtgcaatgtccacctaaggttatgaacaaattaaaagcagaaatacatttgttcaaaactcacctgcaaaactgaacgggggaaatatgcaaacgagtgatacccgcgcgttaccgctactttgcgcccgcagcgtttataaacagtatagtggggtcaatgtcctgaaaggcatcgattttacgttgcatcagggggaggtccacgccctgctcggcggcaatggtgccggtaaaagcacgttaatgaagattattgccggtattacccctgctgatagcggtacgctggagattgagggcaacaactacgtcagattaacgccagttcatgctcatcagctgggtatttatctcgttccccaggaaccgctgcttttcccaagcctgagcataaaagaaaacatcctgtttgggctggcaaaaaaacagctctccatgcagaaaatgaagaacttgctggcggcgctgggctgccagtttgatctgcatagtctggcaggaagcctggatgtcgccgatcgccaaatggtggaaatcctccgcgggctgatgcgcgacagccggattctgatcctcgatgaacctaccgccagccttacccctgcggaaaccgaacgcttgtttagtcgcttgcaagagctgcttgctactggcgtgggtattgtttttatcagccataagctgccggaaattcgccagattgccgatcgaattagcgtgatgcgcgacggaaccatcgccttaagcggcaaaaccagcgaactgtctaccgacgacattattcaggccatcaccccagcggtacgggaaaaaagcctctctgccagccaaaaattatggctggagttacctggtaaccgcccacaacatgccgccggaacgccggtgctgacactggaaaatctgaccggcgaaggtttcaggaatgtcagcctgacgctcaatgccggagaaattctgggcctggctgggctggtgggggccggacgcacagaactggccgagacgctctatggtctgcgtactttgcgtggcggacgcattatgctgaatggtaaagagatcaataaattatccactggagaacgtttactgcgcggtctggtttatctgccggaagatcgccagagttccggactgaatctcgatgctagcctggcctggaacgtctgcgcccttactcataaccttcgtggattctgggcgaaaaccgcgaaagataatgccaccctggaacgttatcgtcgggcgctgaatattaaattcaaccaaccggaacaagctgcacggacattatccggtggcaaccagcaaaaaatcctcattgccaaatgcttggaagctagcccgcaagtattgattgtcgatgagccgacgcgcggcgtggatgtcagcgcccgtaatgatatctaccagctgttgcgcagcatcgccgcacaaaatgtggctgtgctgcttatctcctccgacctggaagagatcgaactgatggcagatcgtgtgtatgtgatgcatcagggcgaaattacccactctgcactgaccgagcgcgatattaatgtcgagactattatgcgcgttgccttcggcgatagtcagcgtcaggaggcgagttgctgagctaaagtcagcgtcaggaggcgtcatgctgaagtttattcagaacaaccgtgaaatcacggcactgctggcggtggtgctgctgtttgtattacccggttttctcgaccgccagtatttaagtgtgcaaacgctgaccatggtttatagcagcgcgcaaatcctgatcctgctggcaatgggcgcgacgctggtaatgcttacgcgcaatattgatgttagtgtgggtagcattaccggaatgtgcgcggtgctgttggggatgttactgaacgcaggatatagtctacctgttgcttgtgtcgcgactttactgcttggtttgctcgcgggatttttcaacggtgtcctggtcgcgtggctaaagatccctgccattgttgccacccttggcacgttagggttgtacagaggcatcatgttgctgtggactggcggcaaatggattgaagggttacccgccgaactgaaacagctctccgccccgctgctgcttggcgttagtgcaattggttggttgacgataattctggtggcatttatggcctggctgctggcaaagacggcgtttggacgcagtttttatgccacgggcgataatttacagggcgctcgtcaactgggcgttcgtactgaagccattcgcattgtggcatttagcttgaacggctgcatggcggcactggcgggaattgtgtttgctagccagattggttttatccccaaccagaccggtaccgggctggagatgaaagcaattgcagcctgcgtgctgggcggcattagtttgctcggtggttccggtgcgatcattggtgcggtactcggcgcatggttcctgacgcagatcgatagcgtactggtgctgttgcgcattccggcatggtggaatgattttatcgcgggtctggttctgctggcggtgctggtgtttgatggacgcctgcgttgtgcgctggaacgtaatctacggcggcaaaaatatgcccgctttatgacgccaccgccatccgttaaacccgctagcagtggtaaaaaacgggaggccgcataatgcgtattcgctacggttgggaactggctcttgccgcactgctcgttattgagattgtcgcatttggtgcaattaacccgcgaatgttagatctcaatatgttgctgttcagcaccagtgactttatctgcattggcattgtcgccctaccgctaacgatggtgattgtcagtggcgggatcgatattagctttggtagcaccatcggcctctgcgccattgcattgggcgtactgtttcaaagtggtgtgccgatgccgctggcgatactcctgaccttactgctcggcgcattgtgcgggctgatcaacgccggattaattatctataccaaagttaacccgctggtgattacgcttggcacgctgtatctgtttgccggaagcgctctgctgctttccggtatggccggagcgacggggtacgaaggtattggtggattcccgatggcgtttacagatttcgctaacctggatgtgctgggactccccgttccgctgattatcttcctgatatgtctcctcgttttctggctctggctgcataaaacccatgccggacgtaatgtgtttttgattgggcaaagcccgcgcgtggcgctttatagcgcgattccagttaaccgtaccttatgtgcgctctatgccatgacggggctggcgtctgcggtcgccgctgtgctgctggtaagctattttggtagtgcacgttccgatctcggtgcgagctttctgatgcccgccatcaccgccgtggtgcttggcggggccaatatttatggtggttccggttccattatcggcaccgccattgcggttttattagtgggatatttgcaacaaggtttgcaaatggcaggagtgccaaatcaggtgtccagcgccctttccggtgcgctacttatcgtcgttgtcgtaggtcgttccgttagcctgcatcgccagcaaattaaagagtggctggcgcgtcgggccaataacccattgccataaaggatatcttcatgacacttcatcgctttaagaaaatcgccttacttagcgctcttggcattgccgcaatctctatgaatgtgcaggccgcagagcgtattgcatttattcccaaactggttggcgtgggattttttaccagcggtggcaacggcgcacaacaagcgggtaaagagctgggcgttgatgtgacctacgacgggccgacagaacccagtgtttctggtcaggtacagttgattaataacttcgtcaatcaaggttataacgccattatcgtttctgcggttagccctgatggcttgtgtccggcactgaaacgcgccatgcaacgtggtgtgagagtgctgacctgggactctgatactaaaccggagtgccgctcttactacattaatcagggaacgcccgcccagttaggaggtatgttggtggatatggcggcgcgtcaggtgaataaagacaaagccaaagtcgcgtttttctacagtagccccaccgttacggaccaaaaccagtgggtgaaagaagcgaaagcgaaaatcgccaaagagcatccaggctgggaaattgtcactacgcagtttggctataacgatgccactaaaagcttacaaaccgcagaaggaatattaaaagcgtatagcgatctcgacgccattatcgcccccgatgccaacgccctgcccgctgccgcacaagccgcagaaaacttgaaaaatgacaaagtagcgattgtcggattcagtacgccaaatgtgatgcgcccgtatgtagagcgcggcacggtgaaagaatttggcctgtgggatgtggttcagcaaggcaaaattagtgtgtatgtcgcggatgcattattgaaaaaaggaagtatgaaaacgggcgacaagctggatatcaagggcgtaggtcaggttgaagtcagcccaaacagcgttcagggctatgactacgaagcggatggtaatggcatcgtactgttaccggagcgcgtgatattcaacaaagagaatatcggcaaatacgatttctgatgtgcattacttaaccggagtaagttatggcagatttagacgatattaaagatggtaaagattttcgtaccgatcaaccgcaaaaaaatatcccttttaccctgaaaggttgcggtgcgctggattggggaatgcagagtcgcttaagccggatatttaatccgaaaacgggtaaaaccgtgatgctggcttttgaccatggttattttcagggaccgactaccggacttgaacgcattgatataaatatcgccccgctgtttgaacatgccgatgtattaatgtgtacgcgcggcattttgcgcagcgtagttccccctgcgaccaataggccggtggtactgcgggcgagtggtgcgaactctattctggcggaattaagtaatgaagccgtggcgttaagcatggatgacgccgtgcgcctgaacagttgcgcggtggcggcgcaggtttatatcggcagcgaatatgaacatcagagcatcaaaaatattattcagctggttgatgccggaatgaaagtgggaatgccgaccatggccgtgactggcgtgggcaaagatatggtgcgcgatcagcgttatttcagcctcgcgactcgaatcgccgctgaaatgggggcgcaaattatcaaaacctattatgtcgaaaaaggttttgaacggattgttgccggatgtccggtacccattgttattgctggcggtaaaaaattaccggagcgcgaggcgctggaaatgtgctggcaggctatcgatcagggcgcttctggtgtggatatggggcgtaatattttccagtctgaccatccggtggcgatgatgaaagccgtacaggcggtggttcaccataacgaaacggctgatcgggcatatgaactctatctgagtgaaaaacagtaactgcggatctaaggagaagaattatgcacgtcacactggttgaaattaacgttcatgaagacaaggttgacgagtttatcgaagtttttcgccagaaccacctgggctctgtacaggaagaaggcaatttgcgcttcgatgtcttacaggacccggaagtgaatagccgcttttatatctacgaagcctataaagatgaagacgcagtggcgttccataaaaccacgccccactacaaaacctgtgtcgcgaaactggaatctttaatgaccgggccgcgtaaaaaacgtctgttcaatggtttgatgccgtgaggcgaatttatcaattttatctacaattggggtaacgcgctgacgggagtaaaaaaatgtctgactggaacccctctttatatctacacttttccgctgaacgaagccgtccggcggtggagctgcttgccagagtgccgctggaaaatgtcgaatatgttgccgatcttggctgtggcccaggtaacagcaccgcccttctacaacaacgttggcctgcggccaggataacaggcatcgacagctctccggcgatgattgctgaagcgcgcagtgctttgccagactgccagttcgtggaagcagacatccgcaactggcaaccggtacaggcactcgatctgatttttgctaatgccagtctgcaatggctgcccgaccactacgaattgtttcctcatctggtttctttacttaatccgcagggcgtgctggcagtacagatgccagataactggctggagccgacccatgtgctcatgcgcgaagttgcctgggaacaaaactacccggatcgcgggcgtgagccgttggctggcgttcatgcttactacgatattttgagcgaagccggatgtgaggtcgatatctggcgaaccacctactatcaccagatgccgagtcaccaggcgattatcgattgggtgactgccactggattacgtccgtggttacaggatctgaccgagagcgaacagcagctttttcttaagcgctaccatcagatgctggaagagcagtatccactgcaagagaacggacagatactgctggcatttccgcgtctgtttattgttgcccggcgtatggagtaaatatcacgtcagctggtaatgacgatcgggaagaatttttgctggaatttcggcttcatcgttcatctgtaacaggtcaatttcaatagcgttgcagatggcatccagtggtaaatcattgttttcagtaccgaacggatcttccagttcttccgccagacaatccaggctaataaaagtgtaggaaatcagcacagagataaaaggcgtcatgtaatgcaggtccacgaccagcgcgaacggcagcatgatacaaaacagataaacggtacgatgcaaaatcagggtgtaggcaaagggaattggcgtataggcaatgcgctcgcatcctgccaggaccgcactaatatcattaagccgatcgttgaggctaataaacaggatatcactaagctgtccattgcggcgctgaaccgccaaccattctcccattattaacaagatacggttagctggagagttgctagccagtacacgctgaagatcttcagtcttgagataatgagccagcacttccgcctgtggctgtttgcgtaatgtcatgcgtaaacagtgggcgaaagcgatttgcagccgggcaaactcccttacacttgcgctatccggcaatgtcgtttttacctcgcgcagtaagctccgactggcaatcatcaactgcccccaaagttttcgcgcttcaacgtaacgggcgtacccggcattattacgaaaaccaagaaaaatggcgatggcgacaccgagaatgctgaacggtgcgagggtgaatttgatgcccagatgcgtgtaccagggcagcatgaaaataacagcgatagaaaagagaaaattgagtagtaagcggctggatatcttggataatacactgccgtgccagacaaaaatacggcgcagccagtgttgttgtggacgaacaatcatggttatcttcaggcgtggaaaagtcgccctattaaacgtgattacgatcacattctcaagacgctacttacaaattacctacaagcttacaacattagcaggcgctgcatgtggcacctgttaatgataaaggcatataggatgttgtaactaatatggtgaaataagaaacccggtcgaaaccgggttcagaagtaacggtgttattagcacaacggacgtacagcttcgcgcatccctttttcgagaatcgcatccaggtcattagcaacctgctcgaccagaccaggcacttgcgtcaggtcctgctcccagtggtctttttctgccaaaacaatcgctaccagttcctgggtgccgataacacggtcacgatgctggctccagagttgctgataacgttccagccagtgtgcatcgtcctgtaccggatatgtttcgccgttacgctcaccacgatagaacgcaatcaatgccgctaatgcgaaagtaaggcgcgccggaagtgtgccgtttgccttctgccctgccagcagctgtggcaggatgcgggtgcggaacttggtcataccgttgagcgcgatagacagcagctgatgcttaatgtacgggttacggaaacgcccggtgactgcactggcgaaagattccagttcatcacgaggcaaatccagtaccggaataatttcttcgtagatagctttttcaacgaatgcgcaaatttcagcatcgttcatcgcttcacctacggtatccagccctgcctggaacgccaccggcaccagcgcggtgtgcgcaccgttgaggattgccactttgcgttctttgtacggtttaatatcgtcaacaatcagcacgttgagcggatatttgtccagacgcagttcagtcgctaaggatttcggtccctgaatcacaaacaggtaaaagtgttcagcggtgtcgagaaaaccatcgtgataacccagttcttcttccagtttagccacttcatcgcgcggataaccggtaacgatacggtccaccagcgtagaacagaagctgttagcctgatccagccattgaataaatgcttctggcagtgcccactcttgcgcatagcgcagcaccagttcacgcaacgcgtcgccattgtagtcaatcaactcacacggaatgatgatccaacctttatccagcgcaccgttgaaatggctaaagcgttcgaacagcagacgggtcagttttgccggatagcttaccgctggcgcgtcatcgaatttatcgcccgcatggtagctgatacccgcttcggtggtgttagagaaaacaaagcgcatttccgggttgtgcgccagtttcaggaattcatcgtattcactgtagacgctgatttcacgattaacgctgcgaatcagacgcgcgtcgctgaccgcttcccccttctcattcaggccacggataatggtggtgtacagaccatcctgcgtgctcagactcggcgggaaactagtttcaatcggacgaacaacgaccacgccagaattcagatcggtgtgctcattcaggagatcgatttgccagtcaacaaaggcgcgcaggaagttaccttcaccaaactgaatgatacgttctggatactgtgcaccgggaaaatcgcgacgatttagtgttttcacaatgggttcccttctgattagtcatacaacctgtttgaattggtacgacaggttagcaaactttaatacgccgaacccctgttttgatcaactcctgatgattaatgagcagttttatgagaaaagtgtggcgcggatcatggtttaatcgaggaaaaacgccttttcctggatcataaagtggtagaacacattgcattcaaatcgcgcgtaatgaataaagatgtcagacaacttcctcaccgtaacgcatagtgctggtacggttgcgcccatctttcttgctgcgatacagacacgtatcggcttcgaccatcaatttattaaagtcatcggtcagcgttaggtagcttgcgcgaccactaccgacgccaatacttaccgtgagataaagcgttttttgttgccaggtgaatggttgcagttcaacgcctttacggattttttccgccattagcagaccatcgacaggattcacgctcggcactgcaacagcaaattcttcgccgcccattcgcgccaccagccccttatcaccgacaatcttctgaatatgccgggcaaacacgcttaacactttatcgccacattcatgtccatagttatcgttaatgcttttgaaatagtcgatatcaagcagcatgacagtcagatgttgtgtctgtttcaggcttggacttttcagcgcctcataaagaccggaccgactgtaaacctgagtcagaaaatcaaagtcggctcgcagcgcaacttgcttcattaggctattgatcgctgccacgctaaaagaaaccataattgggcatatcgccatcgtggcaataccgagacgtgcggagaacatttgcggaatggagaacgggctaccgacgctgatatcaatcacgctatttgccaccagtacgatttccaccgcaccggtgacaaaggtcaacagacatgttacctgcggcgtatagcgcactgcacaccagattaatgcaggcagcgggaacgccagactccccgctccgccaatgactacgctggcaataacgctcacaataagcgcgatggcgggcatcatctgttctgctttaaagcgcggcagcactccaggaatagccaacgtcagcatacaaggcacgatcaacacgcccgtactgaattgctcactgaaccagtccgcaagcaaaggccagaaatccagactatcaatactgaccgaaccaagatagcatgttcgctgacagcggcggcaaataaaggtaccctgggaatgctattttgtcgttttccgcaattctcatggctgattcatctgtacaaccagccagtgatagattaccgccacgatataacgttgttgttcttcgcttaagctaacaccctgcggaatgttatgccacttagccagacaaccgcgacagcaggtcgcggtggcgtgctgagcgataaacaccggatgcccgcgcatgggggtttgcttaccgtcattagccggtaatgccggagcaagacgtttagcgacaaaatccgccgcatgttgttcgatgactggcgcgcctttctccaggcaatactgacgctctttcatgcccagacgaaagcgagagcgaaatttactacgggataaacgcgcgaagagtggatcgagagactgcattaataaacgctacgccctaactgtttcgtcaattgttcaagaacggcaatacccgcaaggctgttacctgcatcatccagttccggactccagacagcgatggccatttcatgcggaacaatcgccacaataccgccaccaacgccagatttcgccggtagccccacccgccaggcaaactcccccgcgttctggtacataccactggtcgccatcagcgcgttaatttgccgcgcctgcattggcgtcaccactggttcatcaatatgaatagctttcccctgattagccagaaagacaaacgtccgggccagctctacacagctcattttcagagcgcagtaatgaaagtagttttgcagaacggttgtcacgtcatgatggaaattgccaaagctcttcatcagccaggcgatagccgcatttcgcgcggaatgttcaaattcggaacgcgctaccaccgtatcgtaggaaatatcagacacaccgcttaagccgcgcacgacttccagcatacgttgccgtggtgcgcttaatcgcccttgcaacatatcgcagaccaccagcgcaccggcattaatgaacggattacgcggtataccctgctccatttccagttgcactaaggaattgaacggacttccagacggatctttgccgacgcgttgccagatttcctcttcggagtaatgacgcatggcgacaacgagactcagcactttggaaatagactgaatggaaaaacgttcttgcgcgtctccggcctgaaaaagctgtccgtcaacggtacagatagcaatccccaatcgggaaccgtctactgtagccagcgccggaatataatccgcgactttaccctgaccaatgagcggccgcacttgccgcaagatgttttctaaaattgcattatccatggcgactgccactttctactcctggaccgcaggtctgaaaagacctgcgagtatatcagagctgaatatgtcgcgtcagatccggtctttccacaccgtctggatattacagaattcgtgtaagccgaaatgggaaagctcacgaccaaagccactctttttcacgccaccaaaggccactcgcgcgtcgctggcacaataaccattgataaacaccccaccgcattccagacgtgccgccatctgtctggcctgtgtttcgtcagtggtaaaaatggtcgcactaaggccgaactcactatcattagccagttccagtgcatgttctgcatctttcgcaatggtgattgccgcaacggggccaaacatttcttcccgaaacgcggtcatttctggggtaacattcgccagaaccgttggcggatagtagttacctgccccagccatcttttccccgcccagtaacaaacgcgcaccctgcgccagggttttctccacctgatgatgcagctcatcacgtaaatcaaaacgagccattggtccgagagcgttctcttcgtcacggggatcgcccattttcaaggctgccgcagctgccacaaaacgttcggtaaatgcgctagcaattccctcttcgataataaagcgttttgccgctgcacatacctgtccggtattctgataacgtccggctaccgccgctttcaccgccagttccagatcggcatcgttaagcacaataaacggatcgctaccgcccagttccagtacgcattttttcagtgccgctccagcctgtgcgccaatagccgctcccgcacgaacacttccggtcaccgtgacagcagcaatgcggctgtctttaatcatctgactgacaccgtcgttgtcggcattcagccagccatatacgccttgtgggatacccgcatctttaaacacctgggcaatgagctgtgcacagcccatcacattcggcgtatgtttaagtaagtagccgttacctgcaagaatgatgggaacagcgccacgcatcacctgccataacggaaaattccacggcataatcgccagaatcgtccccaacggtcgatactcaataaccgcctgctgattttccaccagcgtaggttccgccttcagcattgccggaccatgttctgcataccagtcacacaaattcgcgcttttcgccacttcagcgcgcgcctggttgattggtttgcccatttcgcgggtgatcatttgcgccatttcttcgctacgagcgcgcagagccttaccgatatcacgcagtttttcagcacgataatctatatttgtctcgcgccagtcgcgaaagcctgctgccgccagctgaagtgcgttttcgatatcgtcagcgccagcccacggcagcacagaaagttgttcacccgtggcaggatttatgctaattgcatgagttgccggagtaatggtcatcggggtatctcctttatgagtcatggtatgaagatacgcagatttactcttgctttaaaatgaataatattaagccacttattcacgaatcgagaatgctatggatctgacccaactggagatgttcaacgcggttgccgaagctggcagcataacccaggctgcagcaaaagtgcatcgcgtgccgagcaatctcactacccgtctgcgccagctggaaacagaactgggggttgatctgtttattcgcgagaatcagcgtttacgtctctctcctgccgggcataactttttacgctatagccaacaaattctcgcgttagtggatgaagcgcggagcgttgtcgctggcgatgagccgcaaggtttattttctcttggtagcctggaaagcaccgctgcagtgcgcattccagccacgctggcggaattcaaccgtcgttatcccaaaattcagtttagtctttccaccggcccttccggcactatgctggatggtgtactggagggaaaactgaatgcggcgtttattgatggacccattaaccatactgccatcgacgggataccggtataccgcgaggaactgatgatcgtcacgccacaaggatatgcgccagtaacccgtgccagtcaggttaatggcagtaacatttatgccttccgcgccaattgtagctatcgtcgccacttcgagagctggtttcatgctgacggtgccgctccgggaactatccatgagatggagtcttatcacggaatgttggcctgtgtgatcgcaggagcaggcattgcgcttattccgcgctctatgctggaaagtatgccggggcatcaccaggttgaagcgtggccgttagctgagcaatggcgttggttaacaacctggctggtctggcgtcgtggtgcgaaaacacgtccgctcgaggcatttattcaactgctggatgtgcctgacagcgcaagacagggatatcaatgagctatttttgatagttcttgcggttaatatgctctatatagtgatgttccgatgacttatgactatatggggcaaatatggttacgccagtaagcatcagcaattacatatctcttcctgatgattttcccgtacgtaatattgcaccgcaggtaaaagaagttttaaaggattttattgatgcacttagtacaataatatgtaatgaagagtggcgcacgtctttaaacatcaacagtgccacaaaaaagatatttaataaccttgacaacttaagttatattcagaggacttcttttcggggtaacgacacgctatacaatgaaaaggttcagtttaaactcacttatcccgccaggaatggaagacacaaagaaaatattgaatttcaggtagtaataaatttaagccctatttatttagataattttcgccatgatggagaaattaatattttttgcgctcccaacccaaagcctgtcactatggggcgcgtatttcagaccggcgtcgagcgtgtactctttctgtttctgaatgattttattgaacaatttccaatgatcaaccctggtgttcccatcaaaagagcgcatacaccacatattgaacccctgcctagcgatcaccataccgctgcagattacttacgccagtttgatttgcttgtcctgaattttatctctcgcggtaattttgtcatactcccccgattatggagtaactctgaggttcacagatggttcgtcaataaagatcctaacttgatcaccgccattctcgacataacggacagcgaattaaaagaggatttgttgcaaagcctgatggatagtttaggttctaacaaacatgtactacccgaagtctgcatctgctttttatcccttttagcagaacaagaatctcctcattttcagaacttgtttttatttttcgccaatatgttattgcactatcaccaatttatgaatcccaatgaaagtgatttgaatgacgtgttgatgccagcaagtttaagtgatgataaaattatcaaacatatggcgcgcaggaccctcaaactgtttgtaaaaaatgaaacaccgccaaaagttactcacgaagacctggtgaaaaacaggcctcgctcccctgtcagaccacctatacccgcaaccgccaaaacgccagacctccctgaacgtcattaaaccgtgatgttaccgactctctgacgcgtgaaagaatcagcgtcagagaaacggaaaacgcgatccagatcacaaatgcattgtattcacatcattaaccgttttaagatcatttcatcactttttcgcaactcacccgataatctgttatgacaacaaacactgtttcccgcaaagtggcgtggctacgggtcgttacgctggcagtcgccgccttcatcttcaacaccaccgaatttgtccctgttggcctgctctctgacattgcgcaaagttttcacatgcaaaccgctcaggtcggcatcatgttgaccatttacgcatgggtagtagcgctaatgagtttgccttttatgttaatgaccagtcaggttgaacggcgcaaattactgatctgcctgtttgtggtgtttattgccagccacgtactgagctttttgagctggagctttaccgttctggtgatcagtcgcattggtgtggcttttgcacatgcgattttctggagcattacggcgtctctggcgatccgtatggctccggccgggaagcgagcacaggcattgagtttaattgccaccggtacagcactggcgatggtcttaggtttacctctcgggcgcattgtgggccagtatttcggttggcgaatgaccttcttcgcgattggtattggggcgcttatcacccttttgtgcctgattaagttacttcccttactgcccagtgagcattccggtagtctgaaaagcctcccgctattgttccgccgcccggcattgatgagcatttatttgttaactgtggtggttgtcaccgcccattacacggcatacagctatatcgagccttttgtacaaaacattgcgggattcagcgccaactttgccacggcattactgttattactcggtggtgcgggcattattggcagcgtgattttcggtaaactgggtaatcagtatgcgtctgcgttggtgagtacggcgattgcgctgttgctggtgtgcctggcattgctgttacctgcggcgaacagtgaaatacacctcggggtgctgagtattttctgggggatcgcgatgatgatcatcgggcttggtatgcaggttaaagtgctggcgctggcaccagatgctaccgacgtcgcgatggcgctattctccggcatatttaatattggaatcggggcgggtgcgttggtaggtaatcaggtgagtttgcactggagtatgagcatgattggttatgtgggcgcggtgcctgcttttgccgcgttaatttggagtatcattatatttcgccgctggccagtgacactcgaagaacagacgcaataattgaaaggcccattcgggccttttttaatggtacgttttaatgatttccaggatgccgttaataataaactgcacacccatacataccagcaggaatcccatcagacgggagatcgcttcaatgccacccttgcccaccagccgcataattgcgccggagctgcgtaggcttccccacaaaataaccgccaccaggaaaaagatcagcggcggcgcaaccatcagtacccaatcagcgaaggtactactctgacgcactgtggacgcgctgctaataatcatcgctatggttcccggaccggcagtacttggcattgccagcggcacaaaggcaatattggcactgggttcatcttccagctcttcgctcttgcttttcgcctccggactatcaatcgctttctgttgcggaaagagcatccgaaaaccgataaacgcgacgattaagccgcctgcaattcgcagaccgggaatgctaatgccaaatgtatccatcaccagttgcccggcgtaatacgccaccatcatgatggcaaatacgtacacgctggccatcaagctctgacgattacgttcggcactgttcatgttgcctgccaggccaagaaataacgcgacagttgttaatgggttagctaacggcagcaacaccaccagccccaggccaattgctttaaacaaatctaacattggtggttgttatcctgtgtatctgggttatcagcgaaaagtataaggggtaaacaaggataaagtgtcactctttagctagccttgcatcgcattgaacaaaacttgaaccgatttagcaaaacgtggcatcggtcaattcattcatttgacttatacttgcctgggcaatattatcccctgcaactaattacttgccagggcaactaatgtgaaaagtaccagcgatctgttcaatgaaattattccattgggtcgcttaatccatatggttaatcagaagaaagatcgcctgcttaacgagtatctgtctccgctggatattaccgcggcacagtttaaggtgctctgctctatccgctgcgcggcgtgtattactccggttgaactgaaaaaggtattgagcgtcgacctgggagcactgacccgtatgctggatcgcctggtctgtaaaggctgggtggaaaggttgccgaacccgaatgacaagcgcggcgtactggtaaaacttaccaccggcggcgcggcaatatgtgaacaatgccatcaattagttggccaggacctgcaccaagaattaacaaaaaacctgacggcggacgaagtggcaacacttgagtatttgcttaagaaagtcctgccgtaaacaaaaaagaggtatgacgatgtccagacgcaatactgacgctattaccattcatagcattttggactggatcgaggacaacctggaaagcccactgagtctggagaaagtgagtgagcgtagcggttactccaaatggcacctgcaacggatgtttaaaaaagaaaccggtcatagtttaggccaatacatccgcagccgtaagatgacggaaatcgcgcaaaagctgaaggaaagtaacgagccgatactctatctggcagaacgatatggcttcgagagccaacaaactctgacccgaaccttcaaaaattactttgatgttccgccgcataaataccggatgaccaatatgcagggcgaaagccgctttttacatccattaaatcattacaacagctaattgaaaacgtgacaacgtcactgaggcaatcatgaaaccacttagttccgcaatagcagctgcgcttattctcttttccgcgcagggcgttgcggaacaaaccacgcagccagttgttacttcttgtgccaatgtcgtggttgttcccccaagccaggaacacccaccgtttgatttaaatcacatgggtactggcagtgataagagcgatgcgctcggcgtgccctattataatcaacacgctatgtaatttgttctggccccgacatctcggggcttattaacttcccacctttaccgctttacgccaccgcaagccaaatacattgatatacagcccggtcataatgagcaccgcacctaaaaattgcagacccgttaagcgttcatccaacaatagtgccgcacttgccagtcctactacgggcaccagtaagcttaacggtgcaacccgccaggtttcatagcgtcccagtaacgtcccccagatcccataaccaacaattgtcgccacaaacgccagatacatcagagacaagatggtggtcatatcgatagtaaccagactgtgaatcatggttgcggaaccatcgagaatcaggctggcaacaaagaagggaatgattgggattaaagcgctccagattaccaggctcatcaccgccggacgcgtactgtggctcatgatctttttattgaagatgttgccacacgcccaactaaatgctgccgccagggtcaacataaagccgagcatcgccacatgctgaccgttcagactatcttcgattaacaccagtacgccaaaaatcgctaaggcgatccccgccaattgtttgccatgcagtcgctccccgaaagtaaacgcgccaagcatgatagtaaaaaacgcctgtgcctgtaacaccaggctagccagtccagcaggcataccgaagttaatggcacaaaaaagaaaagcaaactgcgcaaaactgatggttaatccataccccagcagcaaattcagtggtactttcggtcgtgcgacaaaaaagatagccggaaaagcgaccagcataaagcgcaaaccggccagcatcagcggtggcatgttatgaagccccactttgatgaccacaaaatttagcccccatacgaccactaccagtagcgccaacaccccatcttttcggctcattctaccgcctctgaatttcatcttttgtaagcaatcaacttagctgaatttacttttctttaacagttgattcgttagtcgccggttacgacggcattaatgcgcaaataagtcgctatacttcggatttttgccatgctatttctttacatctctaaaacaaaacataacgaaacgcactgccggacagacaaatgaacttatccctacgacgctctaccagcgcccttcttgccagcagcttgttattaaccatcggacgcggcgctacgctgccatttatgaccatttacttgagtcgccagtacagcctgagtgtcgatctaatcggttatgcgatgacaattgcgctcactattggcgtcgtttttagcctcggttttggtatcctggcggataagttcgacaagaaacgctatatgttactggcaattaccgccttcgccagcggttttattgccattactttagtgaataacgtgacgctggttgtgctcttttttgccctcattaactgcgcctattctgtttttgctaccgtgctgaaagcctggtttgccgacaatcttagctccaccagcaaaacgaaaatcttcagtatcaactacaccatgctaaacattggctggaccatcggtccgccgctcggcacgctgttggtaatgcagagcatcaatctgcccttctggctggcagctatctgttccgcgtttcccatgcttttcattcaaatttgggtaaagcgcagcgagaaaatcatcgccacggaaacaggcagtgtctggagcccgaaagttttattacaagataaagcactgttgtggtttacctgctctggttttctggcttcttttgtaagcggcgcatttgctagttgcattagtcaatatgtgatggtgattgctgatggggattttgccgaaaaggtggtcgcggttgttcttccggtgaatgctgccatggtggttacgttgcaatattccgtgggccgccgacttaacccggctaacatccgcgcgctgatgacagcaggcaccctctgtttcgtcatcggtctggtcggttttattttttccggcaacagcctgctattgtggggtatgagtgctgcggtatttactgtcggtgaaatcatttatgcgccgggcgagtatatgttgattgaccatattgcgccgccagaaatgaaagccagctatttttccgcccagtctttaggctggcttggtgccgcgattaacccattagtgagtggcgtagtgctaaccagcctgccgccttccagcctgtttgtcatcttagcgttggtgatcattgctgcgtgggtgctgatgttaaaagggattcgagcaagaccgtgggggcagcccgcgctttgttgatttaagtcgaacacaataaagatttaattcagccttcgtttaggttacctctgctaatatctttctcattgagatgaaaattaaggtaagcgaggaaacacaccacaccataaacggaggcaaataatgctgggtaatatgaatgtttttatggccgtactgggaataattttattttctggttttctggccgcgtatttcagccacaaatgggatgactaatgaacggagataatccctcacctaaccggccccttgttacagttgtgtacaaggggcctgatttttatgacggcgaaaaaaaaccgccagtaaaccggcggtgaatgcttgcatggatagatttgtgttttgcttttacgctaacaggcattttcctgcactgataacgaatcgttgacacagtagcatcagttttctcaatgaatgttaaacggagcttaaactcggttaatcacattttgttcgtcaataaacatgcagcgatttcttccggtttgcttaccctcatacattgcccggtccgctcttccaatgaccacatccagaggctcttcaggaaatgcgcgactcacacctgctgtcacggtaatgttgatatgcccttcagaatgtgtgatggcatggttatcgactaactggcaaattctgacacctgcacgacatgcttcttcatcattagccgctttgacaataatgataaattcttcgcccccgtagcgataaaccgtttcgtaatcacgcgtccaactggctaagtaagttgccagggtgcgtaatactacatcgccgattaaatgcccgtaggtatcattaaccaatttaaatcggtcaatatccaacaacattaaataaagattcagaggctcagcgttgcgtaactgatgatcaaaggattcatcaagaacccgacgacccggcaatcccgtcaaaacatccatattgctacggatcgtcagcaaataaattttgtaatcggttaatgccgcagtaaaagaaagcaacccctcctgaaaggcgtcgaaatgcgcgtcctgccagtgattttcaacaatagccagcattaattcccgaccacagttatgcatatgttgatgggcagaatccattagccgaacgtaaggtaattcatcgttatcgagtggccccagatgatcaatccaccgaccaaactggcacagtccataagaatggttatccgttatttctggcttactggcatctctcgcgaccacgctgtgaaacatactcaccagccactggtagtgggcatcgatagccttattgagatttaacaagatggcatcaatttccgttgtcttcttgatcattgccactcctttttcacagttccttgtgcgcgctattctaacgagagaaaagcaaaattacgtcaatattttcatagaaatccgaagttatgagtcatctctgagataacattgtgatttaaaacaaaatcagcggataaaaaagtgtttaattctgtaaattacctctgcattatcgtaaataaaaggatgacaaatagcataacccaataccctaatggcccagtagttcaggccatcaggctaatttatttttatttctgcaaatgagtgacccgaacgacggccggcgcgcttttcttatccagactgccactaatgttgatcatctggtccggctgaacttctcgtccatcaaagacggccgcaggaataacgacattaatttcaccgctcttatcgcgaaaaacgtaacggtcctctcctttgtgagaaatcaaattaccgcgtagactaacgctagcgccatcgtgcatggtttttgcgaaatcaacggtcattttttttgcatcatcggttccgcgatagccatcttctattgcatgaggcggcggtggcgctgcatcctgttttaaaccgccctggtcatctgccaacgcataaggcatgacaagaaaacttgctaatacaatggcctgaaatttcatactaactccttaattgcgtttggtttgacttattaagtctggttgctatttttataattgccaaataagaatattgccaattgttataaggcatttaaaatcagccaactagctgtcaaatatacagagaatttaactcactaaagttaagaagattgaaaagtcttaaacatattttcagaataatcggatttatatgtttgaaaattattatattggacgagcatacagaaaaagcaaatcacctttacatataaaagcgtggacaaaaaacagtgaacattaatagagataaaattgtacaacttgtagataccgatactattgaaaacctgacatccgcgttgagtcaaagacttatcgcggatcaattacgcttaactaccgccgaaagttgcaccggcggtaagttggctagcgccctgtgtgcagctgaagatacacccaaattttacggtgcaggctttgttactttcaccgatcaggcaaagatgaaaatcctcagcgtaagccagcaatctcttgaacgatattctgcggtgagtgagaaagtggcagcagaaatggcaaccggtgccatagagcgtgcggatgctgatgtcagtattgccattaccggctacggcggaccggagggcggtgaagatggtacgccagcgggtaccgtctggtttgcgtggcatattaaaggccagaactacactgcggttatgcattttgctggcgactgcgaaacggtattagctttagcggtgaggtttgccctcgcccagctgctgcaattactgctataaccaggctggcctggcgatatctcaggccagccattggtggtgtttatatgttcaagccacgatgttgcagcatcggcataatcttaggtgccttaccgcgccattgtcgatacaggcgttccagatcttcgctgttacctctggaaaggatcgcctcgcgaaaacgcagcccattttcacgcgttaatccgccctgctcaacaaaccactgataaccatcatcggccaacatttgcgtccacagataagcgtaataacctgcagcatatccgccaccaaaaatatgggcgaaataactgctgcgatagcgtggcggtatagcaggaagatccatattttccgccaccagcgcccgcaattcaaaatcatcgacatcctgcattgcttcgttttcttccaggcaatgccagcgcatatcgagaagtgcggcgctaagcagttcgctcatctcataccctttgttgaacaggctggcattacgcattttctgttgcagttcgtcaggcattgctgccccgctctgataatgccgggcgtagcgagcgaatacctgcggatgcgttgcccagtgttcgttgatttggctcggaaattcgacaaaatcacgcggcgtgttggtgccggaaagcgtggcataacgctggcgggcaaaaaggccgtgcagcgtatgaccaaattcatggaataaggttatgacatcatcccagagtaacaacgcaggctcaccggcagcgggtttctgataattgcagacgttataaattaccggatgtgttttattaagcgtactttgctcaacaaaattgcccatccatgcaccgccgcttttactatcacgggcgaagaaatcaccgtaaaataacgccagccccacgccattatgatcaaaaatttcccacacacgaacgtcaggatggtagacaggaatatcaaaacgttcgacaaacttaataccgaagagctgattcgcggtccagaatacaccttcatttaacaccgtgtttaattcaaaatatggcttgagctgcgcctcatcaagatcaaatttctcccgccgtacctgttccgcataaaatgcccagtcccacggctgcgcgctaaacccgccctgctgcttatcgataaccgcctgtatggaggctaattcatcgctcgcacgttgacgcgccgctggaacaatttcccgcataaagttaagtgctgcttcaggtgtttttgccatctgatcggcgattttccatgcggcataatgaggaaaaccaagtagtgttgcctgttgtgcacggatctccaccagacgttgaatgatagcgcgggtatcattggcatcatttttttccgctcgcgtccagcccgcaataaacagtttttcacgcgtcgcacgatcgcgcatttcggcaagcgccggttgttgggtggtattcagcagcggaatcagccatttgttatccagacctttctcgcgagccgcctctgccgccagcgcaatctcttgctcactcattcctgccagctgcgcgatatcgttcacaaccagaccgccggatttatttgctgccagtaatcgctggttaaactggctggtcagggtcgcagcttctgtattcagtacttttaattttgctttatcagcttgcgcaagtttggctccggcaaggacaaaacgttgatgaatcacctccaccaggcggatggattcactatcaagccccagggattcacggcgctgccagacagcatctacccgcgcgaataattcaccgttcagatagatatcattagccagttccgccagttcagcggaaaactgctcgtcaagacgctgtaattcatcattggtatgcgccgcagtcatcgcaaaaaagacgctggtaacgcgggtaagtaattctccgctttgttccagtgccagaatagtattgttgaaatcaggcatttgcgggttaagcgcgatggcagcaatttctgcccgcttttgctgcattccctcatcgaatgccgggcgatagtgatgattggcaatttgatcaaaatggggagccagatacggcagtgtgctttgcacaaggaaaggattcattgttgtcattttcttctcctgaacgcgaggtgttccatagcgtaggcttactgataacggagtgcaatcttgcaatccagtattacccgctcttaagcatcccgtgctatgttattgacacacaaaagcgttgaggaacagtgagaagcgcagtgcccagccatcccgatactgctgctttcaccaaatccttagtgcttctttcgtgtttttctattgtcataatggttatctctaaaaaagaggtaagatgcgtactacttactcgccgttattggtattattcagaaaaagtgagtaagactttgcagcaatgtttttgatcctgttcaaataaactaatggcatcagcaacatgctggaaatcaaacgtatgggtaattaatttttctggtttaattaaccctttacttaaccagtcgataacgatcgggaatttatttgcatttaagcgactagagaaaatagagagttcttttccggtaattccttgctgaatcacttcagacggttcactggagaaccccatcaatacaatacgtgccgctggagaagccagcgttacggcctctttcaggatagaaggatgacaagccgcatcgataattaatgtcggcttgatgcctttttcagtgaaaatctcgccaagcggtgtctggctgttattaatcgcccagtcagccccgctctctttcgctttttccagtcgttcatcaatgcgatcggcaacaatcacatttttaacgttatagacgccttttaatacctgaacgatcgtcaggccgattggaccggcaccataaaccagaacggtatcattttcagtcggttgaccatgtccggttacgttagccgcaatggtaaaaggttcgatcattaccgcatattgatcggccactgcttcaggaattttccacgcattttttgccggaaccacggcatattcactgaaaccaccgtcagcgtgcacacctaatacagccagtgtcgtacaaacgttcggtttacctatagagcacggatagcaatgcccacagctgaccaccggatcgacagcaacacgttcaccgactctggcgctttccacgccttcacccactgcatcaatgacgccaaagaattcatgaccaatgacgcgcggatatttcgcaaaaggattatgcccacgataaatatggctatcactaccacaaattccggcaagtttcacttttactcgtacttcacccgcactcggggtgggtatttcacgttcgacaatcgccagttgattcggtttttcaattaatatgcttttcattatcttactccttaccagttccacagcgtgccatcttccagacgtgcgactggtagataagcaggttcatagggatatttcgccgccagcttttcatcgaattcgataccaagacccggtttgtctcccggatgcatatagccgttatcgaaagtccagttgtgcgggaagacttcgagcatttgttcggaataacccatgtattcctggacaccgaaattggggacccacagatcaaagtgcagcgccgcagccatgcagactggactcaaatcggaaggaccgtgactgccagtacgtacctgatacaggctagcaaaatcggcaatccggcgcataccggtaattccgcctgcatgggtcagcgtggtgcggatataatcgatgagttgctcttcaatcagttgtttgcagtcccagatgctgttgaagacttcacccactgcgatgggtgtgacggtatgttggcgaatgagacggaagcattcctggttttccgcaggcgtcgggtcttccatccagaacatgcgataatcttcaatgcttttaccaaagcgcgccgcttcaataggcgttaagcgatggtgcatgtcatgcagcaaatgttcattaaaaccaaacttgttacgtaccgcgtcaaacaatttcggcatgaaatcgaggtatttctccgtgctccacagctgctcttccggccactgtcctttggttgcgggttcataagccagacctttacctttgctcatgccgtaggtggttttcataccagggattccgcactgcacgcggatggctttgaatccaagctcttgatgacgggcataatcatccagagcttcatcaatactgtgaccggtggtatggcaataaaccatcaccccttcacgagacgcgccgccgagtaactggtaaagcggcatgttggcagctttggctttaatatcccacagcgccatatcaaccgcactaatggcgctcatcgtaaccggaccgcgacgccagtaagcacctttatagaaaaactgccagatatcttcgatacggtgcgcatcgcgaccaataagctgcggacaaaggtgatcctgcaaataagaggccacggaaagctcacgtccattgagggtggcatccccaaggcccgtaataccgtcctcagtggtgatttttaatgtgacgaaattacgccccggacaggtaacaaaaacttcagcctttacgatcttcatgttcgattccttgcatcgcttgtcgtgatgcatgaaatctacgcaactgagctactaccatacaagtataaagatcgaaaaaagccggagtgatcacaaaaaaaggcgtatatttgcgctgtgaatggttgacaaaagatgaaatagaataccttttgtcagctgacacttcctcttatcttattgataaaatggatttatgttcttacgtgcgcccccagcccgcaacaatgatcaacatgccgcaaagcgcaatcaacgcacccgtccagtcataaagagtcagtttcacgccatccacaacgcgcagccacatcaacgccgtgcagacataaacgccaccataagccgcgtaaacacgcccactcgccgctggatgcaacgttaacaaccagacaaacagcgccagactaatccccgccggaagcaacagccagatactggcgtttcgttttaaccacaaccagggcagaaagcatccaataatttcacacagcgcagtagcaaaaaatagtaacgttgttttaatcatctttgtctcttattgacatcatgtatagttatagggcgacataatatcatcaatataaacaccctcctggtacgttttgcgtccgcagtggatggtgtagaatcacctttaatcattcatacagggaatgaattatgaaaatcactctcagcaaacgaatcggcctgctcgctattctgctgccttgcgcactggcattgagcacaactgttcatgccgaaactaacaaactggtgattgagtctggcgacagtgcacaaagccgccagcacgccgctatggaaaaagagcaatggaatgacacgcgcaatctgcgccagaaagtgaataaacgcactgaaaaagagtgggataaagccgacgccgcttttgataaccgcgataaatgtgagcaaagcgccaacatcaatgcctactgggagcccaatactttgcgctgcctggaccgtcgaactggccgcgttattaccccctaacctgttattgatttaaggaatgtaaggacacgttatgccaagcgcccacagtgttaagctacgcccgctggagcgtgaagatttacgctatgtacatcaactcgacaataacgccagtgtgatgcgttactggtttgaggaaccctacgaagcctttgttgaactctctgatctgtatgataagcatattcacgatcagagcgaacggcgctttgtggtggaatgtgacggcgaaaaagccggtctggtggagctggtggaaattaaccatgttcatcgccgcgcagaatttcagataattatctccccggagtatcaggggaaaggtctggcaacccgtgccgccaaattagcaatggactatggctttaccgttctcaatctctataagctgtatctgatcgttgataaagagaatgaaaaagcgattcacatttaccgcaagcttggctttagcgttgaaggtgaattgatgcacgagttctttattaatggtcaatatcgtaatgccattcgcatgtgtatattccagcatcagtatctggcagagcacaaaacaccgggtcagactctcctgaagccgaccgcacaataacattaataataatcgatcgtatttttgatggtgtaaacccgttcgacggcgggttttactccttcatcaacaatgattagctgacagtccaccggattagcgtgactgtcatattcacagctctgttttacattaccaacccgttgattattcagtaaagtaaccgctgtgtaatctaattttttgatcggatccgtacttggcgtggcgctgacagataatgttttgtcgttacttttcgtggttttacccagcggataaccctgatcatcatagcgatattccatctgcatttgtttgctgctggctttaatcacgaagccattatcatcggtttcccaactcaccccggcagaaggtaattctgctagctggcattttccctgtaaacgtactctcttctccagcgtctcggcatcacggtaataattggcgtccagtaccagagcgaccacggtattattttccagatccagtaattcgagactatcaaaacagccttcttcgctcaaagtcccagaaacacgtttcgtcacttcaccttgctcatccattaatgtctgagtgaaatcttttaccggaccacgcagcggatcaaaatcgaattcattagagaaactggccatctcaggggtaaaactaagtgttacctctgtgcggtcacatcctgtgaggaatatcgcgagtaagcatggtagtaatttgtatttcacaacagtcaccagagagtagagatgattctcaatcatagtagcaaatacagtactttacacgttaaatgctatgcttaaagaagttatcttcgcgtaaggagcttatgatgaaactcagtacctgctgtgccgcgcttctgctcgccctcgccagtcccgcggtactcgccgcgccgggatcctgtgagcgcatacagagcgatataagtcagcgcattatcaataatggcgtacccgaaagcagcttcacgttaagtattgtacccaatgaccaggttgatcagcctgattcccaggtcgtcggccattgcgctaatgatacgcataaaattctctatacccgcaccaccagcggtaacgtctctgctcccgcgcagtctagccaggatggcgcgcctgccgaaccgcagtaacacattatcgactgaacgccggatatgacaaatccggcgatttgaacatacaacataatcccaccttattactcatacccttctattgatatggattaataattcttaacccaaaatgggtagactccctctattgttagcgcgctaaatattcaatatataaacttttatataacgataaagaacagggagtgagttatgtccaaaaatgaacgaatggtgggcatcagccgcagaacactcgttaaatctaccgcgataggttctctggcgctggctgcaggcggtttttctttgccgtttaccctgcgcaatgcagcagcagcggtacaacaggcccgcgaaaaagtggtctggggtgcctgttccgtcaactgtggtagccgctgtgcacttcgtctacatgttaaagataatgaagtgacctgggtggaaactgacaataccggcagcgatgagtacggcaaccatcaggtacgcgcctgtttgcgcggtcgctccatccgccggcgtattaatcatcccgatcgcttgaattacccaatgaaacgcgtgggcaaacgcggcgaaggcaaattcgaacggattagctgggatgaagccctggatactatcgccagtagcctgaagaaaaccgtcgaacaatatggcaatgaggctgtatatattcagtactctagcgggatcgttggcggcaatatgacccgctctagcccaagtgccagcgcggtcaaacgcctgatgaactgctacggcggtagtctcaaccagtatggctcctacagcactgcgcaaatttcctgtgccatgccctacacctacggcagtaatgatggcaacagcaccacggatattgaaaacagcaagctggtcgtgatgtttggtaacaacccggcagaaacccgcatgagcggtggtggcatcacttatcttcttgaaaaagcgcgcgagaaaagcaacgccaaaatgattgttatcgatccgcgatataccgatacggctgccggtcgtgaagacgaatggctccctattcgcccgggcaccgatgccgcgctggttgcgggtattgcctgggtattgattaacgaaaatctcgttgatcaaccttttctcgataaatactgcgtcggctatgacgaaaaaaccttacccgcagatgcacccaaaaatggtcactataaagcctatattcttggtgaaggtgacgataaaacagcgaaaacgccgcagtgggctagccaaattaccggtatcccggaggaccgtatcatcaaactggcgcgtgaaattggcacagcaaaacccgcttatatctgccagggctgggggccacaacgccaggcaaacggcgaactgactgcacgcgctattgctatgttacctattttgacgggcaatgtcggcatcagcggcggaaatagtggcgcgcgtgaaagcacctataccattaccatagaacgcctgccggtgctggataatccggtcaaaacgagtatctcctgcttcagctggacagatgctatcgatcatggtccgcaaatgacggcaatccgcgacggcgtccgcggcaaagataaactggatgtgcccattaagttcatctggaactacgcgggaaataccctcgttaatcagcattctgacatcaacaaaacgcatgaaattctgcaggacgaaagcaaatgcgaaatgattgtggtcatcgaaaactttatgaccagtagcgcaaaatatgccgacattctgctgccagacctgatgaccgttgagcaggaagatattattcctaacgactacgccggtaacatgggatatctcattttcctccagcctgtcaccagcgaaaaattcgaacgcaaaccgatttactggatcctgagtgaagtcgcgaaacgtcttggacctgacgtctatcaaaagttcacagaaggtcgcacgcaggaacaatggttacaacatctgtacgccaaaatgcttgccaaagatccggcgttaccgtcttacgacgaactgaaaaaaatgggtatctataagcgtaaagatcccaatggccattttgtcgcctacaaagcatttcgtgacgaccccgaggcaaatccacttaaaacgccttccggtaagattgaaatttattccagcaggctggcggaaattgcccgtacctgggaactggaaaaagatgaagtgataagcccattgccagtttatgccagtacctttgaaggctggaactcccctgaacgtagaaccttcccactgcaactgtttggtttccattacaaatcccgtactcacagcacctacggcaatattgatctcctgaaggctgcctgccgtcaggaggtgtggatcaaccctatagatgcgcagaaacgtgggattgccaacggcgatatggtgcgggtgtttaaccatcgtggcgaagttcggctaccagccaaagtaacaccacgtattctccctggagttagcgctatgggccagggagcctggcacgaggccaatatgtctggcgataaaatcgaccatggcggctgtgtgaatacgctaaccactctgcgccctagtccactggcgaagggaaacccgcagcacactaatctggtcgagatcgaaaaaatataacccacgacaaccataaattctggcatgacattttgtttgaaaagcaataagtgagtaatgatgaaaatccataccacagaggcgctcatgaaggctgaaatcagccgtagaagtctgatgaaaacctccgcacttggcagtcttgcgctggcaagcagtgctttcactctgccattttcccaaatggtccgggcggcagaggctccggtagaagagaaagcggtctggagttcctgcaccgttaactgcgggagccgctgtctgttacgtttgcatgtgaaagatgacaccgtgtactgggtggagtctgatacgacaggtgacgacgtctacggtaatcatcaggttcgagcgtgtttacgcgggcgctctatccgccgacggatgaatcatcctgataggttgaaatatcccatgaagcgcgtcggcaagcgcggtgaaggtaaatttgaacggataagttgggacgaagccctggataccatcagtgataatcttcggcggatcctgaaagattacggcaatgaggctgtacatgtcctgtacggaacaggcgtagatggcggaaacatcaccaacagtaacgtcccgtaccgtctgatgaactcttgcggtggttttctcagtcgctatggcagctacagtaccgcacagatcagtgccgcaatgagttatatgttcggtgccaatgatggcaacagcccggatgatatcgccaatacgaaactggtcgttatgttcggaaataacccggcagaaacgcggatgagcggcggtggtgtcacttactacgtcgagcaagcccgcgaacgtagtaacgcacgcatgatcgtcatcgatccacgttataacgacactgctgccgggcgtgaagatgaatggctgcccattcgccctggcaccgatggcgcactggcctgtgcgattgcctgggtactgattactgaaaacatggtcgatcagccatttctcgacaaatattgtgttggttacgatgaaaaaacgctgcccgccaacgcaccacgtaacgcgcattataaagcctatattctgggcgaagggcctgacggcatagctaaaacgccggaatgggcagcaaaaatcaccagcatcccggcagaaaaaattatccagttggcacgagagatcggtagtgcaaaacctgcttatatttgtcagggttgggggccacaacgacattccaacggcgagcaaacatcccgcgctattgccatgctttccgttctcaccggcaacgtcggcataaacggcggcaacagtggcgtacgcgaaggtagctgggatctgggggtagaatggttcccgatgctcgagaatcctgttaaaacgcagatttccgtctttacatggacagatgccatcgaccatggtacggaaatgaccgcgacccgtgatggtgttcgtggaaaagaaaaactggatgtccccatcaagtttttatggtgctacgccagtaacacattgatcaatcaacatggcgacatcaatcacacccatgaggtgcttcaggatgacagcaagtgcgagatgattgttggcattgaccacttcatgacggccagcgctaagtattgcgatatcctgttgcccgacctgatgccaacagagcaagaagaccttatctctcatgaatctgcagggaatatgggctatgtgatcctcgcccaacccgcaaccagtgcaaaatttgaacgcaaacccatctactggatgctgagtgaagtcgccaaacgcttaggaccagacgtttatcaaacctttactgaaggtcgcagtcagcatgaatggatcaaatatctccatgcgaaaacgaaggaacgtaaccctgagatgcccgactacgaggagatgaaaacgaccgggatctttaagaaaaaatgcccggaagaacactacgtcgctttccgcgcattccgtgaagatccacaggcaaacccgttgaaaacacctagcgggaaaatcgaaatttattctgaacgactggcgaagattgcagatacctgggaattgaaaaaagatgaaattattcatccccttcctgcgtataccccaggttttgatggctgggacgatcccctgcggaaaacctatccactgcagttaacgggcttccattacaaagcgcgtacccactccagctacggcaatattgatgtgttacagcaggcctgcccacaagaggtgtggatcaaccccattgatgctcaggcacgcggtatccgtcatggcgataccgtgcgggtatttaacaataatggagaaatgctgattgccgcaaaagtgactccgcgtattctgcctggcgttaccgccatcgggcaaggtgcgtggcttaaagcggatatgtttggtgaccgggtcgatcacggcggcagtatcaatattctgacctctcaccgccctagtccgctggcaaagggaaacccgagccacagcaatcttgtccagatcgaaaaggtttaaggagtagcccatgaccacacaatatggattttttatcgattccagccgctgtactggctgtaaaacctgcgaactggcgtgcaaagattttaaagatcttggcccggaagtcagtttccgccgtatttatgaatacgctggcggcgactggcaggaagataatggcgtctggcaccagaacgtgttcgcttattatctctccatctcctgtaaccattgcgatgaccccgcatgtacaaaagtctgccccagcggcgcaatgcataagcgtgaagatggctttgtggtggttgatgaagatgtttgtatcggctgccgctactgccacatggcttgtccgtacggcgcgccacagtacaatgctgaaaaagggcacatgacgaagtgcgatggttgttatagccgcgtcgccgaggggaaacaacccatatgtgtcgaatcctgcccgctgcgtgcacttgagttcggtccaattgaagagctgcgccagaagcacggcactcttgctgccgtcgcgccactgccgcgcgcgcatttcacaaaacccaatatcgttatcaaacctaacgccaacagccgcccgaccggcgataccactggttatctggctaatccggaggaagtgtaaaatgggaaatggatggcatgagtggccactggttatctttaccgtattgggtcaatgcgtagtaggcgcgctgattgttagcggaattggctggttcgccgccaaaaatgacgcagaccgtcagcgtattgtccgtggcatgtttttcctctggctgttgatgggcgtcgggtttattgcctctgtcatgcacctgggaagcccactgcgggcgtttaactccctgaatcgaatcggagcttctggtctgagtaacgagattgctgccggttccatattttttgccgttggcggattatggtggctggtggcagtcatcggtaaaatgccgcaagcgttggggaaactctggttacttttcagcatggcgctcggcgtcattttcgtctggatgatgacctgcgtgtatcaaatcgacaccgtgccaacctggcataacggttacactacgctggctttcttcctgacggtattgttgagcggtccaatacttgctgccgcaattctgcgggcagctcgcgttacatttaataccacaccatttgccatcattagcgttctggcgctgatcgcttgtgccggggtgattgtgctgcaaggtttgtctctggcgtctattcacagttccgtgcaacaagccagcgcactggtaccagattacgcctccttacaggtctggcgtgtggtattgttatgcgcaggtcttggatgctggctttgcccgctcattcgtcgccgtgaacctcacgttgccggacttattctggggctaatcctcatacttggcggtgagatgatcgggcgtgtgctcttttatggcctgcacatgacagtaggaatggctattgcaggttaacaaattggtgcggggcaacccgcacatttcaggatgttaggaatgacccattttagtcagcaagataatttttctgtcgcggcgcgcgtgttgggcgcgctgttttattacgctccagagagtgcggaagccgcacctctggttgcggtactcaccagtgacggctgggaaactcagtggcctctaccagaagcgagtttagcgccgctggtgacggcttttcagacacagtgtgaagagactcacgcccaggcctggcagcgtttgtttgtcggcccgtgggcactgccgtctccgccgtgggggagcgtctggctggatcgcgaatctgtgctgtttggcgatagtacattggcacttcgtcagtggatgcgcgagaaaggcattcagtttgaaatgaagcaaaacgaaccggaagatcattttggtagtctgctgttgatggctgcgtggttggcggagaatggtcgccagacagaatgcgaagaattgctggcatggcacctttttccgtggagtacacgttttcttgatgtttttatcgaaaaagcagaacaccctttctaccgtgcactgggtgaactggctcgcttaacgctggcgcaatggcaaagtcaactgttaattcctgtcgcggttaaaccgctgtttcgataagatcaccgtaatattgccggatggtgacgattacgcgcaatccggcaataataggttacagtgtcacgtttttttatctcttaaagcacgcactgcttttgcggctggcctcttttgccgcaaaatagtcgcccgtgtttcattgcccatttctgctcatgcatcatctacacatctatccggatctgcgcactatgttccaccgtctgcttatcgcaacagtcgtcggtattctcgcggcctttgccgttgccgggtttcgtcatgcgatgctgctactggagtggttgttcctcaataatgactccggcagtctggtcaatgcagcgacaaacctttccccctggcgacggttgctaactccggcgctcggcggactggcggcgggtttgttgctgatgggctggcagaaatttacccaacaacgccctcatgcgccgaccgattatatggaagcgttgcaaaccgatggacagttcgattacgcagcaagcctggttaaaagccttgcctctctgctggtagtaaccagcggcagtgcaattggtcgcgaaggtgcgatgattcttttagctgcccttgccgcctcctgttttgcccaacgttttacgccacgccaggagtggaaattatggatcgcctgtggggccgcggcgggaatggctgcggcctatcgtgccccgcttgctggcagtttatttatagccgaagtgctgtttggcactatgatgttggcctctctcggcccggtgattatttccgccgtcgtggcattgctggttagcaatctgattaatcatagcgacgcgttactctacaacgtacaactcagtgtgacggttcaggctcgtgactatgcgctgattatcagtacaggtgtgctggcaggtctgtgcggaccactgttgttaacgttaatgaacgcctgtcatcgtggatttgtgagtctcaaacttgcgccgccctggcaactggcactaggcgggttgatcgtgggtctgctttccctgttcacacctgcagtgtggggcaacggctatagcaccgtacaatcctttttaaccgccccaccactgttaatgatcattgccgggatcttcctttgtaaactgtgtgccgtgctggcgagtagcggttccggcgcacccggtggggtctttacaccgacgctatttatcggtcttgccattggcatgttgtatggtcgtagcctgggattatggttccctgatggcgaagaaattacacttttactcggattgaccgggatggcgacactgttggcggcgaccacgcacgcgccgattatgagcacgttgatgatatgtgaaatgaccggggagtatcagctactccccggtttattgattgcctgcgtaattgcgagcgtaattagccggacgttacaccgtgactctatctaccgccagcacactgcgcagcatagctaagcggatgtattgccccagttcacgctgttcggcgcgcggcagataaggcagttcaccaatgagcggtgccggaagttttttacccagcacatcaatgatttccgcataatgcgccagtcctgggttgattcggttagccacccagccaatgagcggcagcccgtcgttggcgatcgcctgagctgttagcagtgcatggttaatgcaaccttcctgaataccgacaaccatcaacaccggcagttgttcctgcactacccattcagagagtggacgcaaatcattcatcagactgcgccagccgccagtcccttctaccacgacatgatcgactttttcggtcaggtttgccaggccgttactaatgagggtgtaattgattgggcaactgtgcgccacgctactttcttcttcgcttaacgcgataggattaactgcttcataaggcagttcgatggtactaacactctgcaacaccagggcatctttattacgcagcccttcgggtgtctctttgctccccttcgctacgggtttatatcccgcaaccgtttttccctgggaggctaacgcttgtagcaatgcgcgggaaaccaccgttttccctacagaagtgtctgtaccggtaataaagaaacgcttcagcatcactaactccaccgttatgcttcacaaatataaaccaggaaaataattaaccttgaaagtctaagttatgctttcctggcccaaattgagatagcgcaaattttggtagaacagttaaaaaatgttaaccctgcaacagacgaatcaacaaagaaccgttatacatcgcgtcttttaccagtgcagcgcctgccatcgtgccctggttagaaaactgagtactctcaacgctgatgtgctgactatacgcaggaagggcctgctgacggatgctgtcactgatgaccgggaagaggatatctgccgctttacttaacggactgccaatcagtattttttgtgggttaaataaattcaccatgatggcaagaatgcgcccgacatgcgcgcccaccccggtaatgatgtcttttgccagtagatcgccgcgcaatgccgcctgacacaaactgtccacggttaacggttgtccatgtaacatgctgctcatggattgattaagacgcagctgtgccagctcaagaatactgtccacgctggcgatggtttcgaggcagccgtgattcccgcaataacagcgtttcccatacgggtcgacctgtgtgtggcctatttccacgagactactgctgcctgcgtgtagcagatgaccatcggtaatgacgcccgcccccacgttgtgatcgataaccacctgaatcacatcgcgcgccccgcgactggcaccaaacaaggcctctgccatcgtccatgcgctgatatcatgctgaatataaaccggaacgccggtatgctgctccagcgcctcgccgagcggcatctcttttacatcctcgtagaacggcatgcgatgtacaataccattttccgtatcaataattcccggcaaggttatggcaatgctagttagacgctcaagttttttctggtggcggataaaaaactgatcgatatgggaaataatacgatccagcaatggcaagtcatcttttaacgccagttcctggctctcttccaccaccagtttgctgctcagatcgcgcagagcaaggaaaatctccccgcgactaatgcgcagagaaagatagtgccaggcttcagtttcaaccaccagccccaccgccggacggccacggttccccgcttctttgatttccagctcttgcaccaggtgtgcttcgagcatctcacggacaattttagtgatactggcaggagccagttgcgccagacgggaaagatcgatacggctgactggaccaagctgatcaatcaggcgataaaccgcgcccgcgttggtctgctttatttgatcaatgtgcccaggctggttttcagcaaccaccgcatactccctatattttcgcgctccgaaataatctgtaggctatggtgaagcacttcaatacgtgtcgtcaaatttttacttaggcatgtgattaacagcacatttttcgggctttttcgctgaaatttccctcacctgagagcattcagcagatgaatacgaaagttacgcgcagccggactttgttcatgatgtttcggccagaccaaccacatttcagaaaccgcatcctcttcagcaatcggcacccagcgcatttcgttgagctgaacacgtttaaaactcgcaggcaaaatactaacacccagaccggcggaaaccagaccgatgatggtcattgcctcgcccacctcctgagtgatgacgggcgtcaaatggtaacgtcgcatcagcccgagaatatcgtcatacagccctgtcccgacgtgcggatcaaaaaagacaaagggttctttcgccagttcagccagcgttacattcgggttatttgccaggggatgatcgtgcgggatcatcgccataagcggttcatggacgatgactgcgtgttcaaggctctccggtaacgctgtgttacgcagcaatcccatatccagcgttccttcaatgagcggagcgatttgctcgcgagtgttcatttcgcgggtttgtaaatggacatcaggataatcacggcgaaacaggcttaacgtatcggacaccgcccgaataaaaggagcgctgctagtaaaaccaatgcgcaactcccccgcttcaccctgatgcagcctttcagcgcgagcggcagcgtcatccaccatagacaggatttgccgactatctgcaagaaactgttttcctgctgccgtcagcaatacactgcgattggttcgtgccagcagtcgggcaccaatttgttgctccagcgcctgaatctgctgacttagcggcggttggctaatattcaggcgggcagcggcgcgcccgaaatgcagctcttccgcaacagcaacaaagtaacgcagatgacgaagttcaatattcatatttaaaacatcttatttgagattattaatatattagacagaacaattcgattttcctaccctatgtataagcctgatctacaggcatatttagcaaggatttcaagtgagccgtactacaactgttgatggcgctccggcaagcgacactgacaagcaaagcatttctcagccaaatcaatttattaaacgcggtacgccgcaatttatgcgcgtcaccctggcgctgttctctgccggactggcaacatttgcacttctctattgtgtgcagcctatccttccggtgcttagccaggagtttggcttaacccccgcgaacagtagtattagtctgtccatttccacggcgatgttggctattggtttgctgtttactggcccgctatccgatgccattggtcgcaaaccagtgatggtcacggcgctactgttggcctccatttgtacgttacttagcacaatgatgaccagctggcacggcattttgattatgcgcgccttgattgggcttagcttaagtggcgtggcagctgttggcatgacttatcttagcgaggaaatccatcccagtttcgtggcctttagtatggggttgtatatcagcggcaacagtattggcggcatgagcggacgcttaattagcggtgtcttcacggactttttcaactggcgaattgctctggcggcaatcggttgtttcgcgctggccagcgcgttgatgttctggaaaatcctccctgaaagtcgccattttcgcccgactagcctgcgccctaagacgttgtttatcaactttcgtctgcactggcgtgaccggggattaccgttattgttcgcagaaggctttttgctgatggggagcttcgtcacgctgtttaattacatcggctatcggttgatgctctccccctggcatgtcagtcaggccgtggttggcttattaagcctggcttatttgaccggtacatggagcagtcccaaagccggaaccatgaccacccgctatgggcgtggtccagtgatgttgtttagcacgggggttatgctgtttggtttactgatgaccttattcagcagcctgtggctgatctttgccggaatgttactcttcagtgcaggattcttcgcagcccacagtgtagccagcagctggatcggcccccgcgcaaaacgcgctaaaggccaggcctccagcctgtatctgttcagttactatctggggagcagtattgccgggacgctgggtggtgttttctggcataactatggctggaacggcgtcggcgcatttattgctctgatgctggtcattgctctgctggtcgggacgcgtttgcatcgtcgtctgcacgcctgaaaaataagtccggactgcggtaaatacccgtccggacttattgccagctcaaaccaacgttaatagccatcctaaaatagacgaagcgccagccaattcccgcagcgcgtctagcgtcatcaggattataagtacccaaataaacggattcattttgctgtgtgtcatttattactgatgcgcagttattctactgctttgtaagtagtaaaatagttaacccgatcaagactactattattggtagctaaatttcccttaagtcacaatacgttattatcaacgctgtaatttattcagcgtttgtacatatcgttacacgctgaaaccaaccactcacggaagtctgccattcccagggatatagttatttcaacggccccgcagtggggttaaatgaaaaaacaaattgagggtatgacaatgaaaaaagtattagctctggttgttgccgctgctatgggtctgtcttctgccgcctttgctgcagagactacgaccacacctgctccgactgcgacgaccaccaaagcagcgccggcgaaaactacacatcataaaaaacagcataaagcagcacctgcccagaaagcgcaggcggctaaaaagcatcataaaaatacgaaagctgaacagaaagcccctgaacaaaaagcgcaggcagcgaagaaacacgccaagaaacacagccatcagcaaccggcaaaacctgctgcacaacccgcagcgtaagttttcaacagtaatgctggcgcgccccctcgcgcctgaaaattacggtgctaagcgggtaacgtttagcaccgcctttagcggagggtagtatggtgggccgttatcgctttgagttcattctgatcatccttattttatgcgcactgattaccgcccgtttttatctttcctgattgtagttatctgattttactcccactttcatcccgtcccgtctatagtatttatgagggtttgcttttaataatcataattacccaccagagtgtgatatgcgtacaaccattgctgtagtgttgggtgcaattagtttgacgtctgcttttgtgtttgcagataaaccagacgttgccagaagcgcaaacgatgaggtcagcaccctgttttttggtcatgatgatcgtgtgccagtgaatgacacgacccaaagtccgtgggatgcggttgggcaactggaaacggccagcggcaatttatgtacggcgacgctgattgcacccaatctggcattaacggcaggacactgtttattgacacctccaaagggtaaagccgataaagcagtggcgctgcgttttgtgagtaataaaggtctttggcgctatgagatccacgacatagaaggccgcgttgatccgacactgggaaagcggttaaaagcagatggggatggttggattgtacctcccgcagccgcgccgtgggacttcggattgattgtgctacgtaatcccccttctggcattacgccgttgccgttatttgagggagataaagccgcgcttaccgccgcattaaaagcggcaggtcgtaaagtgactcaggcaggctaccctgaagatcatctcgatacgttgtacagtcatcaaaactgtgaagtgactggctgggcgcaaacgagcgtgatgagtcatcagtgcgataccttgccgggtgacagcggtagccctctgatgttgcataccgatgacggctggcaattaattggggtgcaaagtagcgctcctgccgcgaaagatcgctggcgcgccgataaccgggccatttctgttaccggttttcgcgacaagctggatcaactgagccaaaaataatgttcaaacgctgcccgacagcgcgggcagcgtcttcatcaggcaagtttcaccatgatcattccagccaacagcaagaccaggccaatccagcctttacgatttaaccgttgaccaaacaagatccaacctgcggctaacgtggcggcaataccaaacccgccccacaatgcataagcgacagacaagtcgatccctttaacggcttgagaaagcgcactaaaggcagccagcaccgccgccagggagagcaagccaaatattttgcgacgaaagccgtcagaaaatttcaaaaagacgttagcaacgatttccagcacgattgccaatgccagccaggcggcgtgaacccattcaaactgcgccatggttcacctccagttcaggtttacgcgctttacgggtaccactttttatcaacacaatcccggcgaccagggtggttaacccggcaattttcatcaggcttaaactttcgtcgaataacaaaacgctaaacaaggtaataaataaaataccgataccttcccacagcgcataagctacgcctaaggcgatttttttaacggcgaaagagagaaatatatagctcagagaaatcatcaccagcattaaaataaagccgccatttccctcactgacgctcgcccatttcatactcagcgtaccggtaatttctgtagcaatagccagacctaataaaatccaataaatatacattgtccttctcctgcaagagaattattttaattttcgcttaattcagcgaaaccaaagtaaagtggtcaagccccgcgcatagcgcaagctttggcagaagaaaggactaaagcgcgttgcgccagtgctgctcacctacgagcaagatagtggatgaggtacgaagatgggtaaatgtagaaaataacgtcctgaacaaattgtccataatattacaattatccgcagtgttgcttctcgtcatcgcggatgataattgtcctcggtagttgaacacgcctgatttgtatcatagcttaagaattaactcaaaatattttcacttctttacctgagcggtttgattttcgttatgatgacggagcgaaaaagacattattattagcaaaggaagaaaaaacggggacaagcatggcaaagccgatcatcacgctcaatggcctaaaaatcgtcattatgttgggaatgctggtcattattctctgcggtatccgttttgccgccgagatcatcgtgccgtttattctcgcattatttattgctgttattcttaacccgctggtgcaacacatggtccgctggcgtgtgccgcgtgtactggcggtgagcattttgatgaccatcatcgtgatggcgatggtgttgctattagcttatctgggttccgcgctcaacgagttgacgcggacgttaccgcaatatcgcaactctattatgacgccgctgcaagcgcttgaaccgttgttgcaacgcgtagggattgacgtcagtgttgaccagctggcgcattatattgatccgaacgcggcgatgacgttgctcaccaacttattgacgcagttatctaatgccatgagtagtatatttttattgctgctgacggtgctgtttatgctgctcgaagtgccacaattgcccggaaaatttcagcaaatgatggcgcgtccggttgaagggatggcggcgattcaacgtgcgattgacagtgtttctcattatctggtgctgaaaacagccatcagcatcatcaccggcctggtcgcctgggcgatgctcgccgcactcgatgttcgcttcgcttttgtctggggattgctggcctttgcgcttaattacatcccgaatattggtagtgtcctcgcggcaatcccccctatcgctcaggtactggtgtttaatggcttctacgaagcgttgctggtgctggcgggatatctgctgattaatctggtcttcggcaatattctggagccgcgtatcatggggcgtgggctggggctttccacattggtggtatttttgagcttgattttttggggatggttgttaggaccggtgggtatgctgctttccgtgccgttgacaattattgtcaaaattgcgcttgaacaaacagcgggaggtcaaagcatcgccgttctgttaagcgatctcaataaagagtgacggcctcagcagaggccgtcagggttacagagctttcaggattgcatccacgctggctttggcgtcaccaaacagcatgtgggtgttttccttgaagaacagcgggttttgcacaccagcatagccagtgttcatgctacgtttaaagacaatcacgttctgcgctttccacacttccagcacaggcataccagcaatcggactcttcggatcatcctgcgccgccgggttaaccgtatcgttagcaccaatcaccagtacggtatcggtatcagcaaagtcatcattgatctcgtccatttccagcacgatgtcatacggtacttttgcttcagccagcaatacgttcatatgtccaggcaaacgccccgcgaccgggtggataccgaaacgcacattaataccacgagcgcgcaatttctcagtaatttcagcgacaggatattgcgcctgcgcgactgccatgccgtaccccggagtaatgatcacactatgggagtttttcagcagttccgctgtctcttctgcggtgatttcgcggtgctcacccacttcctgatcatcgccagtagaagagccgtcggtgccgaaaccacccgcaataacgctgataaaggaacggttcatcgccttacacataatgtaagaaaggatagccccgctagaaccgaccagcgcaccggtcacaatcagcaggtcgttgctgagcataaagcccgcagccgcagccgcccagccggagtagctgttcagcatgctcaccaccactggcatatctgcaccaccgatggaggcgactaaatgccagccgaataccagcgcaattgcggtcattatcagcaatgccagcacttgcaggccgacgctgtccgtgcgaacaaatacaatcagcagcaggaaggaaacgaccagagccgccaggttcattttgtgacggtttggcagcatcaatggtttagagctaatcttgccacacagtttgccgaacgccaccacgctacccgtgaacgttaccgccccgatgaagataccgaggaacacttccgtcaggtgaatattgaccagaatcggtgccattcccgcgtcatgatgcagatagctgttaaagccaaccagcactgccgccagacccacgaagctatgcaggatcgccaccagttctggcatttcggtcatttcaactttcttcgccagacggataccaattgccccaccaatgaccatcgccagcaagatccagccaacattacccgtatccggtccaaaaatggttgcgattaacgcaatcgccatcccggcgataccgaagttgttaccctggcgagacgtttcatgtttgctaagaccggccagactgaagataaacaggatcgcggcaacaatgtatgcagctgtaactaatcctccagacatatgttaccccttaatttttgcggaacattttcagcatgcgctgagtcacggtgaagccaccgaaaatattaatgctggctataagcaccgcgataaaactaaggaagctaacccagccgccctggccaatctgcaacagtgctccgacaacaataatcccactaatcgcgttggtgacgctcatcaacggtgtatgcagcgcgtggcttacattccacaccacgtaataaccgacaacgcaggccagcgcgaaaacggtgaagtgcccaaggaattctttcggcgcaacgcttgccatccagccaaaaagaatgattgccagcgccatcaacgcgtatttacgccacggactgcaggtacatttttcctcagttttcacttccggtgccgctttttgtgccgcctgcggctgagcacttacctgaatcggcggtgccggccaggtaatttcgcccgcacggatcacggtcacgccgcgaatcaccacatcatcaaaatcaacagtgatattgccgtctttctctttgcacaacagtttcagcagattaacgaggtttgtgccgtaaagctgactggattgcgtcggcagacggcccggaagatcggtataaccaatcactttgacaccattttccgtagtgaagatttcacccggcacggtgtattcacagttgccgccgttttgggctgccaggtcgacaatcacactgcccgccttcatggagtcaaccatttcacgggtaattagcttcggcgctggtttgcctggaataagcgcggtggtgacaatgatatcgacctcttttgcctgggcggcaaagagttccatttccgctttgatgaacgcgtcgctcatcactttggcatagccatcgccgctgccagcttcctctttaaaatccagctcgaggaattccgcgcccatactttgaacttgttctttcacttccgggcgggtgtcgaatgcacgcacaatcgcgccgagactgtttgctgcgccaatggcggccagacctgcaacacccgcaccaatcaccatcacttttgccggtggcactttcccggccgcagtaatttgcccggtaaagaagcgcccaaattcatgtgccgcttcaacaatggcgcgataaccggcgatgttcgccatgctgcttagtgcgtccaggctttgtgcgcgactgatacgcggcacagagtccatcgccatcacggtcacgttacgttccgcaagtttttgcattaattccggattctgcgcaggccagataaaactcaccagcgttgtcccaggattcagtaacgcaatttcatcatctaacggcgcattgaccttcagaatgatctcactctgccagacgctattcccttctacaatttcagcgcccgcttgcacaaacgctttatcgtcaaaacttgccagttgacccgcgccgctctctaccgcgacggtaaaacccagtttcagcagctgttccactgtttttggcgttgctgcaacacgggtttcattggttaaccgttctcttggtatgccaattcgcatgatattcccttccatcggttttattgatgatggtttgcctgtgtcaggagccacacaagctgctcatgtacgagctaaatgttactccgttaaaataaattagtaacaaacgccctataacgtactgaaaattatgcctgtgatctagcgccaaaaatcagtatttcggcgtgaactcgcaaaatattaacgattcagccgtgatagtgggataaacaccttagaacgccggataaagactgataattgtcttcgacggtcgggtaaaacgagacatcgccccggcacgaatcactacttaacattaaattaacttatacaattcagttgcttcagtagtaatgatgctgatacggctgttttttaagcatagacggtcatttgagcaggattaaaattggcttaaggaatgtgatatgaaaaatgacgcagacagttacaccgtttaaatgcaataatcagccacgtttctcgttaataacaataccagtacctggtttgcgcaaggcgaaggattatttttatgaagcttaagaacaccctcctggcgagcgcactgctttctgctatggcattctccgttaacgcagcaacagaactgacaccggagcaagcggcagcggttaaaccttttgaccgtatagtggttaccggtcgttttaatgctattggcgaagcggtgaaagccgtttctcgtcgcgcagataaagaaggtgccgcctctttttatgttgtcgacacttctgattttggtaacagcggtaactggcgtgtggtcgctgacctctataaagccgatgctgaaaaagcagaagaaacaagtaatcgcgtaattaacggtgttgtcgaactgccgaaagatcaggctgttctgattgaaccgtttgacacggtcaccgtccagggcttctatcgtagccagccagaagtcaatgatgccatcaccaaagcggcaaaagcgaaaggtgcctactctttctacatcgttcgtcaaatcgatgccaaccagggcggcaaccagcgtattactgcattcatctataaaaaagatgctaagaaacgtatcgtccagagcccggatgtgatcccggcagattccgaagcaggacgtgcagctctggctgccggtggcgaagccgcgaagaaagttgagatcccgggtgttgcgactaccgcaagtccaagttctgaagtcggtcgcttctttgaaacccagagtagtaaaggcgggcgttacaccgtcacgctcccggatggcactaaagtcgaagaactgaacaaagcgaccgcagcgatgatggtcccgttcgacagcatcaaattctctggcaactacggcaacatgaccgaagtctcctatcaggttgcgaaacgtgccgcgaagaaaggtgctaagtattaccacatcacccgccagtggcaggaacgtggtaataacctgaccgtcagcgcagatctgtataaataactattcagttactcctataaggcggcttgatgccgcctttcgcatttttagtcacaaatttccccgcgaccattgcatgcagacacatctcttcgtaaaatcccgcgcttcagtggcaaactccatttttatgcgttttgccctaatatttattcttcttatcacgttttaatcactggatatcgatggaaaagaaactgggactgagcgcactcaccgcgctggtattaagcagtatgctgggcgcgggtgttttcagtctgccgcaaaatatggcggcagttgccagcccggcagcactgctcatcggctggggtattactggcgctggcattttattgctggcctttgccatgctgatcctcacgcgcattcgtcccgaacttgacggcggtatctttacctatgcccgcgaagggtttggcgagctaatcggcttttgttccgcatggggatactggctgtgcgcagtcatcgccaacgtctcctatctggtgatcgttttttccgcgttaagcttttttacggacacgccggaattgcgcctgtttggcgatggtaatacctggcaaagcatagtcggtgcaagcgctttattgtggattgttcactttttgatcctgcgcggggtgcaaaccgctgccagcattaacctggtggcgacactggcaaaattgttgccgctgggtctgtttgttgtgctggcgatgatgatgttcaaactggataccttcaagctcgacttcaccggacttgcacttggcgtacccgtttgggaacaggtgaaaaacaccatgctgatcaccctgtgggttttcattggtgtggaaggtgccgtggttgtttctgcgcgtgcgcgtaataaacgtgatgttggcaaagcgacactgctggcggttctctccgctctgggcgtttacttgctggtaacgctgcttagcctgggtgtggtggcacgtcctgaactggctgaaattcgtaacccgagtatggccggtctgatggtggaaatgatgggaccatggggcgaaatcatcatcgctgccggtttgatcgtttccgtttgcggcgcgtacttaagctggaccatcatggcagcagaagtaccgttcctggccgccactcataaagcattcccgcgcatttttgcgcgccagaacgcacaagctgcgccatccgccagtctgtggttgaccaacatctgcgtgcaaatttgtctggtactcatctggctgaccggttccgattacaacacgttgctgaccatcgccagtgaaatgattctggtgccctatttcctggtcggcgcgttcttgctgaaaatcgcaacccgtccactgcataaagcggtaggtgtcggtgcctgcatttatggcttatggttattgtacgcctctggtccaatgcacttgctgttatccgttgttctgtatgcaccggggctgctggttttcctgtacgcgcgcaaaacgcatacccatgataatgtactgaaccgtcaggaaatggtgctgattggcatgctgttaattgccagtgttccggcgacctggatgctggtgggataacgttcatcccatcgttggatagcaaaggagataacgatgggtaaaacccagcccttgccaatattaattactggcggaggtcgtcgcatcggcctcgccctcgcatggcatttcattaatcaaaagcaaccggtgattgtcagctatcggacacactatccagccattgatggactgattaatgcaggtgcgcagtgtattcaggctgattttagcaccaacgacggtgtgatggcgtttgccgatgaagtactaaaaagcacccatggtctgcgtgctattttgcataacgccagtgcgtggatggcggaaaaaccgggtgcgccactggccgacgtactggcttgcatgatgcagatccacgttaataccccatacctgctcaaccatgcgctggaaagattactgcgtgggcacggacacgccgccagcgatatcattcactttaccgattatgtggtggagcgcggtagcgacaaacatattgcgtatgctgcaagcaaagcggcactggataatatgacccgcagctttgcccgcaagctggcaccggaagtgaaagtgaattctattgcgccaagcctgatcctgtttaatgaacatgatgatgccgaatatcgacaacaggcgctgaataaaagtctgatgaaaaccgcgcctggcgagaaagaagtgatcgacctggtcgattacttacttaccagttgctttgtcaccggacgcagtttcccacttgatggcggtcgtcatctgcgttaatgcagctttatccagcatataatcaacacccatgcgcttatcccccaacacgcaacagaaccaacaaaagcggcgggcaagcgcatcattccggtgaaataccacaggctcaccaggtaaacaaaatagggaataatgctccacatactaaaaatgatggttgcgcgtaaggcttcaatgccgcgttcgctggcaacaatataatgcgcgataagcgcaaaggtcgggaaaagtggaatcagcccggcgatataataatttttcgtttttgctaaaacaccaatcaacagcactaccagcgcaccgagcgcggctttgattaccagccccatctttttaccttaacacttccataacaagtcatcagtagaatacctgatgaaaacttgtttagaaacgattgatagtaagtaaaaacagcgcggtgtattgtgacgtttttatatctaccgtgaatgttatgaacactatcgtatttgtggaagatgatgcggaagtcggtagtctgattgccgcgtacctggcaaaacatgatatgcaggttaccgtagagccgcgcggcgaccaggccgaagaaaccattttgcgagaaaatccggatttggtgttactcgacatcatgctaccaggcaaggacggcatgaccatttgtcgtgatttacgcgcaaagtggtctggaccgattgttcttctaacctctctcgatagcgatatgaaccacatcctggcactggaaatgggtgcctgcgactatattctcaaaacgacgccccctgctgttttgctagcgcgtttacgtttgcatttgcgtcagaatgagcaagccacactgaccaaaggtcttcaggaaacgtctctgactccctacaaagccctgcatttcggcacgttgaccatcgatcccatcaaccgcgtagtcaccctggctaacactgaaatcagcctcagcacagctgatttcgaattattgtgggaattagctacccatgccgggcaaatcatggaccgcgatgcattgctgaaaaatttacgcggcgtcagttatgacggactggatcgtagcgtggacgtggctattagccggttaagaaaaaaactgctcgataacgccgcagaaccttatcgcattaaaactgtgcgtaacaaaggctatctttttgcgcctcatgcatgggaataagcgatgaaaaaactgtttatccagttttacctgttattgtttgtctgcttccttgtgatgtctctgctggttgggctggtgtacaaatttaccgccgaacgcgcgggcaaacagagcctggatgatttgatgaacagtagcctgtatctgatgcgcagcgaattgcgtgagatccccccacacgactggggtaaaactctgaaagagatggatttaaatctctctttcgatctgcgtgtcgagccactgagtaaataccatcttgatgatatttccatgcaccgactgcgtggcggcgaaattgtcgccctggacgatcagtacacgtttttgcagcgtatcccgcgcagccactacgtgctggcagttggtcctgttccttatctttattatctccatcagatgcgattgctggatatcgccctgatcgcttttattgctatttccctcgcctttccggtgtttatctggatgcgtccgcactggcaggatatgttaaaactggaagcagcggcgcaacgatttggcgatgggcatctcaatgaacgtatccactttgatgagggtagcagctttgaacgacttggcgtcgcatttaaccagatggcggacaatatcaacgccttaattgccagcaaaaaacagcttattgacggtatcgctcacgaactgcgaacaccgttagtgcgcctgcgttatcgactggagatgagcgataacctgagcgccgccgaatcccaggcgttgaatcgtgatatcagtcaacttgaagctttaattgaagagctgctgacttatgcccgactcgatcgcccacaaaacgagcttcatcttagcgaaccagacctgccgttgtggctgagtacgcatctggcagatattcaggcagtaacgcccgataaaacggtacggataaaaacgctcgtgcaaggccattatgcggcgttggatatgcgcttaatggagcgcgtgctggataatttgctcaataacgccctgcggtactgccatagtacggttgaaaccagcctgctactgagcgggaatagagcgacattaattgttgaggatgatggcccagggattgccccagaaaaccgcgaacatatctttgaaccttttgttcgcctcgatcccagccgggatcgcagtaccggcggctgcgggctggggctggcaattgtccactctatagcactggcaatgggcggtacggttaattgtgacaccagcgaactgggtggtgcccgcttcagctttagctggccgttatggcataacatcccgcaatttacctctgcctgacactacgcgcacgatggtcaagtcaccacgactgtgctataaaataagtatgttgtaactaaagtggttaatattatggcgcgttacgatctcgtagaccgactcaacactacctttcgccagatggaacaagagctggccatatttgccgctcatcttgagcaacacaagctattggttgcccgcgtgttctctttgccggaggtaaaaaaagaggatgagcataatccgcttaatcgtattgaggtaaaacaacatctcggcaacgacgcgcagagcctggcgttgcgtcatttccgccatttatttattcaacaacagtccgaaaatcgcagcagcaaggccgctgtccgtctgcctggcgtgttgtgttaccaggtcgataaccttagccaagcagcgttggtcagtcatattcagcacatcaataaactcaagaccacgttcgagcatatcgtcacggttgaaagtgaactccccaccgcggcacgttttgaatgggtgcatcgtcatttgccggggctgatcacccttaatgcttaccgcacgctcaccgttctgcacgaccccgccactttacgctttggttgggctaataaacatatcattaagaatttacatcgtgatgaagtcctggcacagctggaaaaaagcctgaaaagtccacgcagtgtcgcaccgtggacgcgcgaggagtggcaaagaaaactggagcgagagtatcaggatatcgctgccctgccacagaacgcgaagttaaaaatcaaacgtccggtgaaggtgcagccgattgcccgcgtctggtacaaaggagatcaaaaacaagtccaacacgcctgccctacaccactgattgcactgattaatcgggataatggcgcgggcgtgccggacgttggtgagttgttaaattacgatgccgacaatgtgcagcaccgttataaacctcaggcgcagccgcttcgtttgatcattccacggctgcacctgtatgttgcagattaacgcccggctttcatactgccgaccatctgttctggccgtacccagctgtcaaactcggcttcgctaagataccccagcgcaagggccgcagcttttaaggtcagcccttctttatgcgcttttttggcgatctcggcggctttgtcataaccaatgtgggtgttaagcgcagtcaccagcatcaggctttcattgagtaattgattgattcgctcacgattcggttcaatacccactgcgcagtgtttgttaaaactttccatgccatctgccagcaagcgcacgctttgcaggaaattgtggatcaccattggacggaagacgttcagttcaaagttaccggaagcgccccccatgttgatcgccacgtcgttccccatcacctgacagcagagcatggttaatgcctcacactgtgttgggttcactttccccggcatgatactgctgcccggctcattttccgggatactgatttcaccaattccgcagcgcgggccagaggccagccagcggacatcattggcgattttcatcagactcgcagccaaccctttcaacgcgccgtgcgcctgaaccagggcatcacaggtcgccagcgcttcaaatttgttcggcgcggtaacaaacggtgcacaggtaatgactgccagttcatctgctacgcgacgcgcatactccggatgggtatttagtccagtacccaccgctgtaccgccaagagccagttccgctacgtgaggcaggctgtattcgatatgtttgagattatgctcgagcatcgctacccagccggaaatctcctgccccagcgttaacggcgtggcatcctgcaagtgagtacgaccaattttgacgatatcggcaaaagcacgggatttctcattcagtgtctgtgtcagggttttaagctgaggaatgagttgcttgcgcagcgccagcagcgccgcaacgtgcatcgccgtcggaaagacatcgttggaactttggcttttgttcacgtcgtcgttagggtgaactttacgttccatcccgcgcacaccgccgagtaattcactggcccggttagccagcacttcgttcatgttcatgttactttgcgtgccggagccggtctgccagatagccagcgggaattcgtcgtcatgctgtcctgccagtacttcatccgccgcctgacgaatggcgctcgctttctcttcagacaacaagcctaaatcttcattaacttttgccgctgcacgcttggttagcgccagcgcatgaatcagactggtgggcattttctccgtgctaatgcggaaatgctccaggctgcgttgagtttgtgcgccccacagcttatctgccgggacatcaatcgcccccatgctatctttttcgctgcgtactgtattcatgacctgctcctcacctgattaattttttctttctgttttgctttcgttaagcaacttttagctcacttattatttaccatttgataacaaatgtttggtctttcgtgccatgtaaaaaaaccgccccgaagggcggctctgtttatttcacacagcgggtgcattgtgtgagttgtatctgctggaagaagtcatttcctttatcatccacaaggataaacgccgggaaatcttccacttcaattttccagatggcttccattcccagttccggatattcaacacattccaggctcttaatacttccctgcgccaatacagcggccggaccaccgatactgccaaggtagaagccgccgtgttttttacaggcatccgtcacctgctggctgcggttgcctttcgccagcatgatcatacttccgccctgcgcttgcagttgatcgacataagaatccatccgtccggcggtcgttgggccaagagaaccggaggcataaccttccggcgttttggccggacccgcgtagtaaatcggatgatctttgatgtactgcggcagcccttcaccgttatccatccgctctttcagtttggcgtgagcaatatcacgaccgacgataatcgtgccgttaaggcttaagcgtgtagaaacgggatactggctcaactgtgcgaggatctctttcatcggacggttaaggtcaacgcgcaccgcttcgccttctcccgctttgcgcagctcttccgggatatatttgcctggattatgttccagtttttcgatccagatcccctgacggttgatcttcgctttgatattacggtcagcagagcaggagacgcccataccgaccgggcaggatgcgccgtgacgtggcaggcgaatcacgcggatgtcgtgagcgaagtatttaccaccaaactgcgcacccagaccaagattttgcgcttcgatcagcaattctttttccagttccacatcgcggaacgcctgaccgtgctcattcccttccgttggcagttcatcatagtatttcgcggaagccagtttcaccgttttaaggttcgtttctgcagaagttccaccaataacgaacgcaatatgatacggaggacaggccgccgtacccagcgtgcgcatcttctcaaccaggtaatttttcagtttccccggcgtcagtaacgctttggtttcctgatagagatacgtcttgtttgcgctaccaccacctttggcgatacagaggaatttgtattcgtcgccatcaacggcataaagatcgatctgcgctggcagattggtgccggtattcacttctttatacatatccagcggcgcgttttggctgtagcgcagattatcttcgatataagtgttatagacaccgcgcgccagcgccgcttcatcaccaccaccggtccatacacgctgcccttttttaccaacaataatcgcggtgccggtatcctgacaggttggcagaacgcctttcgccgcgatgtcggagttacgcaggaattgcagcgccacatatttatcattttcgctggcctccgggtcacgcagaatgtcggccacctgttgttggtgcgccggacgcagcatgaagctcgcatcatgaaacgcctggcgcgccaacagagttaacgcttcgggtgcgactttcaaaatctcctgcccttcaaattcagatacgctaacgtgttcgctggttagcaggtaatactcagtatcatcttttttgagtggaaaaggagcctgataatgaaagggtttgttactcattgttctctcacttactgcctggtttggttatgctctgggcgggtgttccgttgccctgttaaaagcgagtaacaatatcctacacacttttttaacaaaaactgagactagtacgactttttgcggctccaggttacttcccgtaggattcttgctttaatagtgggattaatttccacattaaaacagggattgatcatgcaaaaactcattaacagtgtgcaaaactatgcctggggcagcaaaacggcgttgactgaactttatggtatggaaaatccgtccagccagccgatggccgagctgtggatgggcgcacatccgaaaagcagtagtcgagtgcagaatgccgccggagatatcgttagtctgcgtgatgtgattgagagtgataaaagcactctgctcggagaggccgttgccaaacgctttggcgaactgcctttcctgttcaaagtattatgcgcagcacagccactctccattcaggttcatccaaacaaacacaattctgaaatcggttttgccaaagaaaatgccgcaggtatcccgatggatgccgccgagcgtaactataaagatcctaaccacaagccggagctggtttttgcgctgacgcctttccttgcgatgaacgcgtttcgtgaattttccgagattgtctccctactccagccggtcgcaggtgcacatccggcgattgctcactttttacaacagcctgatgccgaacgtttaagcgaactgttcgccagcctgttgaatatgcagggtgaagaaaaatcccgcgcgctggcgattttaaaaagcgccctcgatagccagcagggtgaaccgtggcaaacgattcgtttaatttctgaattttacccggaagacagcggtctgttctccccgctattgctgaatgtggtgaaattgaaccctggcgaagcgatgttcctgttcgctgaaacaccgcacgcttacctgcaaggcgtggcgctggaagtgatggcaaactccgataacgtgctgcgtgcgggtctgacgcctaaatacattgatattccggaactggttgccaatgtgaaattcgaagccaaaccggctaaccagttgttgacccagccggtgaaacaaggtgcagaactggacttcccgattccagtggatgattttgccttcagcctgcatgaccttagtgataaagaaaccaccattagccagcagagtgccgccattttgttctgcgtcgaaggcgatgcaacgttgtggaaaggttctcagcagttacagcttaaaccgggtgaaagtgcgtttattgccgccaacgaaagtccggtgactgtcaaaggccacggccgtttagcgcgtgtttacaacaagctgtaagagcttactgaaaaaattaacatctcttgctaagcttattaaaggcttataacaccttcaggcggccagtccgcctgatttcattttatggataatcattatgaataaaagcctggtagcggtaggcgtcattgttgcgctaggcgtagtctggacaggcggcgcatggtatacaggcaagaagattgaaacccatctcgaagacatggtcgcgcaggcgaacgcgcaactcaaactgacagctcctgaatccaacctggaagtgagttatcaaaactatcatcgcggcgtattcagcagccagttgcaactgttggtgaaacccattgccgggaaagaaaatccgtggattaaaagcggtcagagcgtcatcttcaacgaaagcgttgatcatggtcccttcccgcttgcccagcttaaaaaactgaacctgatcccgagcatggcaagtattcaaaccacgctggttaataacgaagtaagcaaaccactgtttgatatggcaaaaggtgaaacgccttttgagattaacagccgcattggttacagcggtgattccagttccgatattagcctcaagccactgaattacgagcaaaaggatgaaaaagtcgcctttagcggcggcgagttccagttaaatgctgacagagacggcaaagccatctccctttccggggaggcgcaaagtggtcggatagacgcagttaacgaatacaaccagaaagtgcagttgacctttaataatctgaaaaccgacggttccagcacgctggcaagttttggtgagcgtgtaggaaatcaaaaactgagtctggaaaaaatgaccattagtgtggaaggcaaagaactggcactgctggaaggcatggagatcagcggtaaaagcgatctggtcaatgacggtaaaacgatcaatagccaactggattacagcctaaacagcctgaaggtacagaatcaggatctgggcagcggcaagctgactttaaaagtcggccagattgatggtgaagcctggcatcagtttagccagcaatataacgcgcaaactcaggcgctgctggcacagccagaaattgccaacaaccccgaactttatcaggagaaagtgacggaagccttctttagcgccctgccgctgatgctgaaaggcgatccggtgattactatcgcgccgctaagctggaaaaacagtcagggtgaaagtgccctgaatctgagcctgttcctgaaagatccggcaacgactaaagaagcgccgcaaacgctggcgcaggaagtagatcgtagcgttaaatctctggatgcgaaactgaccattccggtggatatggcaactgagtttatgactcaggtagcgaagctggaaggttatcaggaagatcaagcgaaaaaactggcgaaacagcaagttgaaggtgcaagtgcaatggggcagatgttccgtctgaccaccttgcaggacaataccatcaccaccagcctgcaatatgctaacggtcagataacgttaaatgggcagaaaatgagcttagaagattttgttggcatgtttgcgatgccagctcttaacgttccggctgtaccggcaattccgcagcagtaattcacggccaaaacgccggagaattttcactccggcgttttcatctgaaaacaaaccagagattgcctgatgcgctacgcttatcaggcctaccttttcctgcaacactttgaatttatgagtttttgtaggctggataaggcgtttacgccgcatccggcataaaaaacgcgcactttgtcaacaatctgaaacgccggagatttttctctccggcgttattttttacttcagcataaagtcatactgaatactcattttcacatcccagtaattcaggcgatcgcccagcgtactgccatcgcgcttttcccgccctttatcggcagcaagaaagaaattcatcccttgtaacggcccttcgctgacccgatagttcataccacctaagatacccgtgccttcaatccgcacatctcgtttactggattcatagccgcgagtcacaatcggtgcaaatgtcagcgtaaattgcggcgttaaacgatagttgacgcccaattgccaggactgcattccttcacggttacgatcaagacttaaactaaagggatagccaatgtcggtatccaccacggcaccattcattgcatggcgcaaataaccaccactgccaaatacacttccccacggcgcattccaggtcaattgtccactaaccaacgccgtttcattgggctggctggtattacgacttaaaccttcgagctgcgcgtaaaagccgagcaactcccctttcaacgtataattcgggtcgagcggtatgcttttctcgagaatactttgtatctgattggaaacatctttctgtacgcttgcccccagagaatagcgactggtatcatcatgccaactggcggctaaaaaagaacgtgcgcgatgtttatcgtattttcccgtctggctgttatacaccccttcatcacgaataccggttgtactatcagtccataaaaatactcgactacgccacattccccacagatcaatatttggtgttaaagcccaataacctaatgctccttcagaaactgtcggtaatgtacgttggctactgccagccattaacggaatacgataaggtaagctaccataactataatccgtcccgaagcgacctaatttaagcaggctattttcactgggttttatttttactgcccccagggcaaagccaaaacttttatcaccatcaagataccaccgggtactcatatcagcacgagcacctaatttataaacataatacgccccgccttcaacgccaataatattggaataataaccactattgaaatcgagcaatcctccctgtacccatgcgtaaatatctcttcccgcgccagcactgggcttatccgccctgcgcaattcgtttttcagtctgatgcgtagtcccgcttcatcgtcagccagttgcgccgcataagcagaggtaaggccagaggcagccgtcaggcaaataacggccatggccactatttttctcatagttgcacctttgatgttctgattatttttattgaatattaattagtgatatcgctgattaattgctgctgcacttttttacgattatcaatttcaaccacgatttctttgaattttttatccgtgagcggataaaaccagataataacgaatgccagtagcataaatccgcaaggtactaaggcaatacttgtgcggatgcccataataacttccggcgtttgcacctgattggcgatatatccgcttaaccccaaaataaaggcaggaatactacctccgattgcctgaccgcatttacgggtaaaactgaatagactataggtgagcccttcaattcgcacgccggtcaggtattcaccgtattctacggtatcagcttccagcgcccacatcacggtcatggtaacgccctgaccaatactagcgatggccaacgcaaccaacgccaccggcagactccagacggaaacccagaagaacagcagataaccgcaggttcccagcaaagcgccaatcaggaaggtattctttttaccgatcctcgcgaccatccccggcaccagcggtgcgcttgccacagtaccaaccaggttttgcaccagtaccagcacagtgaacagcccggtatcatttaacacatagcgcacgtagaacaagctgctggcgctgaccgcaaaggtgctaatcagcacacacagcgcaccgatgcacaacataaacagcgggcgattccgtttcagggtttgcagactgatattcaaactcggctgcgcaacgatacgtaccacattctcacgcgtgcttttgaagcagatgaagtaaagcaccattccggcaatcgccagcacaattgtccagaaatggtatacgctcaccatctcttccgggctggagttcttaatgctcggtcctatcagaaatgccaggcagacaaaggtcaaactagcggcaatcccacgagccgcgcccagacgggcgcgggattgtggttgttgggtcatcgcggtagcaagactaccataaggaatattcaccaggctgtagcaaagcccgaggcccatgtaggtcaaatatgcatacaccactttgctaccatggctccagtcggtcagcacccagaataccagcacgctgaagatcattaacggcgcagtaccgaagagtaaaaacgggcggaattttccccagcgggtattcacactgtccaccactcgtccggcaaagacgtcggcgaaggcatcgaatacccgcaccagtaacagcatggtgcccgccgcagcggcaccgacgccagcgacgtcggtgtagtaactcaacaggaagagcgcccccattgcgaaggcgaagttattggcgacgtcaccgaggctgtagccgacgatggtgcgccaggagagttgttgattcattgtttgcctccctgctgcggtttttcaccgaagttcatgccagtccagcgtttttgcagcagaaaagccgcgctcttcggtttgcggtcgcgagtgaagatccctttcttgttaccgccaacgcgcaatatgccttggctggtcgcaaaatcggcgaaattccatacctgttcaccgacgacggcgctgacgcgatcaaagacgcggtgatacatatccagccatgcacactgatactcttcactccacatgtcggtgtacatactgtgcagcccggctaacgtatccacgccgtattcggtgatgataatcggctgatgcagtttctcctgccaggccagaagttctttttccagtaccttctctgccgtttccaaatcgccgctttggacataccatccgtaataacggttcaggcacagcacatcaaagagatcgctgatggtatcggtgtgagcgtcgcagaacattacattgacgcaggtgatcggacgcgtcgggtcgagtttacgcgttgcttccgccagtggcgcgaaatattcccgtgcaccttgcggacgggtatccggttcgttggcaatactccacatcaccacgcttgggtggtttttgtcacgcgctatcagctctttaatcgcctgtaagtgcgcttgctgagtttccccgttgactgcctcttcgctgtacagttctttcggcttgttgcccgcttcgaaaccaatgcctaaagagaggttaaagccgacagcagcagtttcatcaatcaccacgatgccatgttcatctgcccagtcgagcatctcttcagcgtaagggtaatggctggtacggtaggagttggccccaatccagtccattaatgcgtggtcgtgcaccatcagcacgttatcgaatcctttgccacgcaagtccgcatcttcatgacgaccaaagccagtaaagtagaacggtttgtggttaatcaggaactgttcgcccttcactgccacactccggatgccgacgcgaagcgggtagatatcacactctgtctggcttttggctgtgacgcacagttcatagagataaccttcacccggttgccagaggtgcggattcaccacttgcaaagtcccgctagtgccttgtccagttgcaaccacctgttgatccgcatcacgcagttcaacgctgacatcaccattggccaccacctgccagtcaacagacgcgtggttacagtcttgcgcgacatgcgtcaccacggtgatatcgtccacccaggtgttcggcgtggtgtagagcattacgctgcgatggatcccggcatagttaaagaaatcatggaagtaagactgctttttcttgccgttttcgtcggtaatcaccattcccggcgggatagtctgccagttcagttcgttgttcacacaaacggtgatacgtacacttttcccggcaataacatacggcgtgacatcggcttcaaatggcgtatagccgccctgatgctccatcacttcctgattattgacccacactttgccgtaatgagtgaccgcatcgaaacgcagcacgatacgctggcctgcccaacctttcggtataaagacttcgcgctgataccagacgttgcccgcataattacgaatatctgcatcggcgaactgatcgttaaaactgcctggcacagcaattgcccggctttcttgtaacgcgctttcccaccaacgctgatcaattccacagttttcgcgatccagactgaatgcccacaggccgtcgagttttttgatttcacgggttggggtttctacaggacgtaacataagggactcctcattaagataataatactggtcaacctttaatctgattagttaaccaattctgtgttgcacacagttatctgtgagaaacccatggaagagaaatggaaataaaaagaactgacaccgcgatcaaaaaaccaaaaactgcaatacccacagcgtgatatagatcgcattaatctttaaaacagcgttgacagaagccataaaataagcaaccgaacgttcgttcgagcgtattgggaacgataaactctcatgacatatggctacagtgaatattttggggggaattctccgaagccgggaaggataatttttgcacagagaaattacgatatgaaacgcgggcacagttatcaccagcccgccgaaaaagagagagaatcaggatgcggttaagataccgccaatcatcgcgcgtaatccctgagcaaagctcgcttcacgcgccaggtcttccgcttcgatatcggccagtacaccgtaggtcagatccagcagtaaacgactagtcattgccgtgttgatgtctgggcttatctcgcctttttgctgggcatcacgcatccgctgggcaacaaattccgtgatcgtcatatgcttatttttaagcatggcggcgacctgtgggttacgcatcccttccgccataatttcaaccaccagcgcccgttgtccaaaggcttcatgggtgagagagacaatggactcgaccatatagtcaacgaaatgaatcccttcaatcggttcccggaaacgggccagcgccctctcctggtcctgtaagataatcgcctgaatcaaggcttctttggagatgaaatggtgatagagcgtcccgggactaatggcgcaagatttacagatggctttcatgctggcactgtgaaatccattttcactaaaaatctctctggcagcattgaggatccgggtccgtgtcggttgtgcttcagtctgcatgttatccatcattaaaccattatagttagcgtgaataactagtttaccgcgttgtcaggtgagcgcctatcattgctgttgaatagtgcgaaggcacactctattcgtatacttttcactctgaaattggttaaccaatagccgtgatttggctgccagttatttagcagagacgttgatgagtttatcccggtaaacaacacgcacggttgtttaccggtccgttagtgtattaattgagctcctgtaccccaccaccggagacggtgagaatttgtccgcttacccagctcgcagcagggctgcaaaggaacagcgctgcgttagcaatatcttgcggttggcccagacgtctgatcggcgtgtgctgtaacattttttgttcaatttctggtgtaataacggatttcagggcatcggttaatattgcccccggcgcaatgccatttacccgaatatttttttcacccaggtcaaacgccatatttctgaccagatgactggccgcagctttagaacttgcataggaagtcatgtttatatttttattttctgccgccatagaagtgatggtcagaataacgccaccgccatttttttccatttctggcgcaacaagttgactcagatggaaaaaagaaaacacattcagttcataagcacggcgaaaatccgccattggcatatcaaacggtttaggtccaccgccaccggcgttgttaaccagaatatcaactttacccagcttactgatagcaaagtctgccagtgcagagagttcctgttcggaagtaatatcacaacggcaggcaaatgcctgaccacccagttgttgaatttcgtctacaacatggttagctgcgtcggcgttaatatcactgaccaccacagatgcgccagctgtcgcgaatgtaatggcgatttctttaccaatacctgcacccgcacctgtgatgatggcgcattttccgtcgagtctcaggttgtcagaattaaacacataaacctcctgtgaacttcagtaaaaataaaaggcaccgcctgtgtgccacattttttatcattaaccttgaggaaaggacactaccaggtatagcagataaagagaggattatttcgctgcaatgagccgggcgggaataataagattgcgactatgcgtctcttcatgggtgattttttgcatcatgcgatccgcaagtgtgataccaagttcccgcgctggcgtgctggcccaggtaacaggtatatcatcaagtgtggttggtgtcgcatcggtaaatgccgccaggctaacctgttgctcaaagtaacgatcgactccgctttccccgctttgccgccctgctttgagcaaaccaaaccatgcccccatcgcaatagtttcgttatagcaaaccacggcactgatggtcgggttatgacgtaaaagcgccgtgatagcttccgcggcttgcttctggctggaagtgcactccaacacccaatcgctatgaaacggcaggccaaattttagtagagttgcacaatagcccccaacccgttctgcacgggttaaactggaactttgccctcccagccaggcgatccgctgatgcccattgcgaatgagatgctccgtcaacaactgtgcagcctgcatgttgtccgggcgaaccgtatcaacatcatcaagataactggcacgggaagcgaaaatcaccgggatagctttttcttctgccatccgtcgcaggtcatcgctacttcctgcagctccggcaattaccacaccatcgacaccctgattcagtaacagactaaaccgctgtgccagctgctcaccgtctttaccgccgtgaagcaaaaaaaccatccgtccctgcgcttccagagcttccgtcaatccggccgtcaattcggcgtaaaacggcgcagataaatcacggacgatcaaaccaatgacgccgctttgcccgccgcgcagcgcgctcgcctggcgattgcgcacaaatcccagctcttcaatggcggcgttaacgcgttctcctgtggcggtagagattcgccctttgccactaagcaccaggctaacggtacttacgctcacgcccgcagccagcgcaacatcatgaatggttatttttttggcggtagccatgcagatgacctactccctgattatgtgacagataaaacgttttaccttttatttatcttatacccgctattatcgttgcgtaatgtgatttatgcctcactaaaatttgataaaacgttttatcttctcgcgcaatttactgaatccagattgttctctacgaggagtcgttttatgacggcgaaaacagcaccgaaagtcacgctgtgggagttcttccagcagttaggcaaaaccttcatgttacccgtggcattattgagcttctgcggcattatgctcggcattggtagttctcttagcagccatgatgtcataaccctgatcccggtcctgggcaaccccgtgttgcaggctatctttacctggatgagtaagattggcagctttgcttttagtttcctgcctgtcatgttctgtatcgccatcccgctgggcctggcacgcgaaaataaaggcgtagcggcattcgctggcttcatcggttatgcggtaatgaacctcgcggtaaacttctggttgaccaataaaggcattctgccaaccacggatgccgcggttctgaaagccaataacatccagagcattcttgggatccagagcatcgataccgggatcctcggtgcggtgatcgccggtattatcgtctggatgctgcatgagcgtttccataatatccgcctgccggatgcgctggcattcttcggcggtacgcgcttcgtaccaattatctccagcctggtgatgggccttgtcggcctggtgattccattagtctggccgattttcgccatgggtattagcggcttgggccatatgataaacagcgcgggtgatttcggaccgatgctgtttggtaccggtgaacgtctgctgttgccgtttggtctgcatcacattctggtggcattaattcgctttaccgacgcaggcggcacgcaggaagtctgcggtcaaaccgtcagcggcgcactgaccatcttccaggcgcaattgagttgcccgaccactcacggtttttctgaaagcgccacgcgtttccttagccaaggtaaaatgcctgcgtttctcggcggtctgccaggtgcagcgttagctatgtatcactgcgcgcgcccggaaaatcgccataaaattaaaggtctgctgatttctggcctgatcgcctgcgtcgttggcggcactaccgaaccgctggaattcctgttcctgttcgtagcgccagttctgtatgtcatccacgcgctgttaaccggcctcggcttcaccgtcatgtctgtgctcggcgtcaccatcggtaataccgacggcaatatcatcgacttcgtggtgttcggtattttgcatggtctgagtaccaagtggtacatggtgccagtggtggcggcaatctggtttgtcgtttactacgtcatcttccgtttcgctatcacccgcttcaatctgaaaaccccggggcgcgatagcgaagttgccagcagtatcgaaaaagccgttgccggtgcgccgggtaaaagtggttacaacgttcctgcaatcctcgaagcattaggcggtgccgacaatattgtcagcctcgataactgcattacccgtctgcgtttgtctgtgaaagatatgagccttgttaatgtgcaggcactgaaggacaatcgggcaattggcgtagtacaacttaatcaacataacctgcaggttgttatcgggccacaagttcagagtgtaaaagatgaaatggccggtctgatgcatactgtccaggcataaggataagatatgttcgattttagtaaggtcgtggatcgtcatggcacatggtgtacacagtgggattatgtcgctgaccgtttcggcactgctgacctgttaccgttcacgattagtgacatggattttgccactgccccctgcattatcgaggcgctgaatcagcgcctgatgcacggcgtatttggctacagccgctggaaaaacgatgagtttctcgcggctattgcccactggttttccacccagcattacaccgccatcgattctcagacggtggtgtatggcccttctgtcatctatatggttagtaaactgattcgtcagtggtctgaaacaggtgaaggcgtggtgatccacacacccgcctatgacgcattttacaaggccattgaaggtaaccagcgcacagtaatgcccgttgctttagagaagcaggctgatggttggttttgcgatatgggcaagttggaagccgtgttggcgaaaccagaatgtaaaattatgctcctgtgtagcccacagaatcctaccgggaaagtgtggacgtgcgatgagctggagatcatggctgacctgtgcgagcgtcatggtgtgcgggttatttccgatgaaatccatatggatatggtttggggcgagcagccgcatattccctggagtaatgtggctcgcggagactgggcgttgctaacgagcggcagcaaaagtttcaatattcccgccctgaccggtgcttacgggattatagaaaatagcagtagccgcgatgcctatttaagcgcactgaaaggccgtgatgggctttcttcccctagcgtactggcgttaactgcccatatcgccgcctatcagcaaggcgcgccgtggctggatgccttacgcatctatctgaaagataacctgacgtatatcgcagataaaatgaacgccgcgtttcctgaactcaactggcagatcccacaatccacttatctggcatggcttgatttacgtccgttgaatattgacgacaacgcgttgcaaaaagcacttatcgaacaagaaaaagtcgcgatcatgccggggtatacctacggtgaagaaggtcgtggttttgtccgtctcaatgccggctgcccacgtagcaaactggaaaaaggtgtggctggattaattaacgccatccgcgctgttcgttaaccccaattgcgcaacgtaaaaaatcgttgcgcaatcgtggatttttaccctgctttgtttttataatggtgcgcacttttatatccagaaaaagagtgcgaccatgattgataccaccctgccattaactgatatccatcgccaccttgatggcaacattcgtccccagaccattcttgaacttggccgccagtataatatcagccttcctgcacaatccctggaaacactgattccccacgttcaggtcattgccaacgaacccgatctggtgagctttctgaccaaacttgactggggcgttaaagttctcgcctctcttgatgcctgtcgccgcgtggcatttgaaaacattgaagatgcagcccgtcacggcctgcactatgtcgagctgcgttttagtccaggctacatggcaatggcacatcagctgcctgtagcgggtgttgtcgaagcggtgatcgatggcgtacgtgaaggttgccgcacctttggtgtgcaggcgaagcttatcggcattatgagccggaccttcggcgaagccgcctgtcagcaagagctggaggcctttttagcccaccgtgaccagattaccgcacttgatttagccggtgatgaacttggtttcccgggaagtctgttcctttctcacttcaaccgcgcgcgtgatgcgggctggcatattaccgtccatgcaggcgaagctgccgggccggaaagcatctggcaggcgattcgtgaactgggtgcggagcgtattggacatggcgtaaaagccattgaagatcgggcgctgatggattttctcgccgagcaacaaattggtattgaatcctgtctgacctccaatattcagaccagcaccgtagcagagctggctgcacatccgctgaaaacgttccttgagcatggcattcgtgccagcattaacactgacgatcccggcgtacagggagtggatatcattcacgaatataccgttgccgcgccagctgctgggttatcccgcgagcaaatccgccaggcacagattaatggtctggaaatggctttcctcagcgctgaggaaaaacgcgcactgcgagaaaaagtcgccgcgaagtaacaaaatggatggtgcaaatgcaccatccatttttcatgcaaggcacaaagtcgcgcgatgtttggcggattcgatgcccagctcaatcaactccattacctggattgcctggcttgccggaaccggattttcaccatcgccatttaacgcatcacgaatagccgcatagtaagccggataattcccaggcaccgtcaacagcgtttcttcgacacgttcctcaccttccacgcgggtaagtacgccatcacgcatatcgtagccccagtcttcctgcggtagacgctcgccatttttcagacgttcttcctgtggatcgaggccatatttcacataactgcctcgggatccatgcacgatataccgtgcactctcagcggctgccagcatggtaccgtgtaaaatgactcgccgctgtggataggacaagatggcgtggaaataatcggtgctctgcgctccgggccgtaactgtgccaaatctaccgtcatgctgaccggtaaaccaaaaagcgtaatggcctgatcaagaagatgtggtgctaaatcgtaccagataccgctgcctgggccgccctgttcacgccaacgatcgcgcacctgcggacggaagcggtcaaaatgagactcaaagtaagcaacttcacccagcacgccttccgcgagtaaaccttttagcgtcaagaaatcgctatcccagcgacggttatggaatacagacagcacacgccccaggctttttgccagcgcatccagctctcgcgcttgactcagtgtcacggtaaagggtttatcaacgaccacatgtttacccgcctcaagcgccgctttggctaacgggaaatgggtatcgttgggtgtaggaatgacaatcaggtctatgttgggatcgttaaacagatgcttcggctcagagacaaccgtaaccgttggccagtcggcttttacttttgtttcatcactgctggagattaccgccagttcctgcccgggcgtgcccgcaatcaggggcgcatggaaggttttgctcgcataaccatacccaatcaacccaacacggatgttgtcgctcatgtcattgcctctcattgaagtatgatggctatttgacactatcctttacccacgctcaacagtttaataacctgccagcaataagggatgttgtttaacttaagtcaaaaaaatagcgaattttccaacgacaaaagctaaatatcgcaaaaacctcagtaaaaatcttgctggagctattattgctaagtaacatttaccccctgaagttaatggatcaatcaagagagatgtgggctgtaatgaatcgtcttattgaattaacaggttggatcgttcttgtcgttagtgtcattcttcttggcgtggcgagtcacattgacaactatcagccacctgaacagagtgctagcgtacaacacaagtaagctctgcacttgtggagcgacatgctgcccgtccgggtgcatgttttcacttgtcggatattaaaccaggaatttattatcttgttcgatgttgttggtgattgtcagggatagtaaagcgcgttactcttttcagagcagtttttcatccctgaatatttgccatcagcgcattcttattattgtaataacacaagcgttcacttttggtgaaattttatcatcactaataatacctacccctttggtattaattattttatggaccttttatgactgttcaggactacttattaaaatttcgcaaaatcagtagtctcgaaagtctggaaaaactctacgaccatcttaattacaccctgacggacgatcaggaactgatcaatatgtatcgtgctgccgatcaccgtcgcgcagagctggtttctggcgggcgtttgtttgacctcggccaggtaccgaagtccgtctggcactatgtccaataaagaaagtagcgatcggttataaaagccttataataacgcccctaaaattagatttgcctgtttgcgtcgctattctggagaacctatgaccaccacaacgccacaacgtattggaggctggttgcttggcccgttggcctggcttttagtcgctctgttgagtacgacgctggcgttgttgctgtataccgctgcgttatcttctccgcaaacatttcaaacgctcggcggacaagcactgacgacacaaatcttatggggcgtttcttttattaccgctatcgccttgtggtattacacactgtggttgaccatcgctttctttaaacgtcggcgttgtgttcctaaacactatattatctggctgcttatttccgtattgctggcagtaaaagcattcgcttttagtcccgtggaagatggcatagccgttcgccagttgctgtttactttgttggcaaccgcattgatcgtcccctatttcaaacgcagcagccgggtaaaagcgacgtttgtgaatccgtaataaccttacagttaacctgttgtcgcctgctctggattaacggataataggcggcttttttatttcaggccgaaaaatgactgactacctgttactgtttgtcggaactgtactggtcaataactttgtactggtcaagtttctcggtctctgtccgtttatgggggtttccaaaaaactggaaaccgcgatgggcatggggctggcaacaacgtttgtgatgacgctggcgtctatttgcgcctggcttatcgatacgtggattttgatcccacttaatctgatttacctgcgcaccctggcatttattctggtgattgctgtggtcgtgcagttcaccgagatggtggtgcgcaaaaccagcccggtgctttaccgtctgctggggatttttttgccgcttatcaccaccaactgtgcagtgctcggcgtggcgttgctgaatatcaatctcgggcacaatttcttgcagagcgcgctgtacggtttttccgccgctgtcggtttcagcctggtgatggtgctcttcgccgccatccgcgaacgccttgctgtggctgatgtcccggcaccttttcgcggtaatgccattgcgttaattaccgcaggtcttatgtctctggcctttatgggctttagtggtttggtgaagttgtaatgaatgctatctggattgccgttgccgccgtgagcctgctgggcctggcgtttggcgccattctgggttatgcctcccgccgttttgcggtggaagacgatccggtcgttgagaaaattgacgaaatcttaccgcagagccagtgtggtcagtgcggttatcccggctgtcgcccctacgcggaagccatcagctgtaacggtgaaaaaatcaaccgttgcgccccaggtggcgaagctgtgatgctaaaaattgccgagttgcttaatgtcgagccgcagccgctggatggcgaagcgcaagagataacgcctgcgcggatggtggcggttattgatgaaaataactgtattggctgcactaaatgtattcaggcgtgtccggtagacgccatcgttggcgctacccgtgccatgcatacggtaatgagtgatctctgtacgggctgcaatttatgtgttgatccgtgcccgacgcactgcatcagcttgcaaccggtcgcagaaacacctgactcctggaaatgggatctgaacaccattcccgtgcgtatcattcccgtggaacaccatgcttaagttattctctgcattcagaaaaaataaaatctgggatttcaacggcggcatccatccaccggagatgaaaacccagtccaacggtacacccctgcgccaggtacccctggcgcagcgttttgttattccactgaaacagcatattggcgctgaaggtgagttgtgcgttagcgtcggcgataaagtattgcgcggccagccgcttacccgtggtcgcggcaaaatgctgcctgttcacgcgcccaccagcggtaccgttacggctattgcgccccactctacggctcatcctagtgctttagctgaattaagcgtgattattgatgccgatggtgaagactgctggatcccgcgcgacggctgggccgattatcgcactcgcagtcgcgaagagttaatcgagcgcatacatcagtttggtgttgccgggctgggcggtgcaggattcccgacaggcgttaaattgcagggtggcggagataagattgaaacgttgattatcaacgcggctgagtgcgagccgtacattaccgccgatgaccgtttgatgcaggattgcgcggctcaggtcgtagagggtattcgcattcttgcgcatattctgcagccacgcgaaattcttatcggcattgaagataacaaaccgcaggcgatttccatgctgcgcgcggtgctggcggactctaacgatatttctctgcgggtgattccaaccaaatatccttctggcggtgctaaacaattaacctacattctgaccgggaagcaggttccacatggcgggcgtagttccgatatcggcgtattaatgcaaaacgtcggcactgcttatgcagtgaaacgtgccgttattgatggcgagccgattaccgagcgtgttgtaaccctgactggcgaagcaatcgctcgcccgggcaacgtctgggcacggctggggacgccagtgcgtcatttattgaatgatgccggattctgcccctctgccgatcaaatggtgattatgggtggcccgctaatgggctttaccttgccatggctggatgtcccggtcgtaaagattaccaactgtctgttggctccctctgccaatgaacttggcgaaccacaggaagaacaaagctgcatccggtgtagcgcctgtgctgacgcctgccctgcggatcttttgccgcaacagttgtactggttcagcaaaggtcagcaacacgataaagctaccacgcataacattgctgattgcattgaatgtggggcttgcgcgtgggtttgcccgagcaatattcccctggtgcaatatttccgtcaggaaaaagctgaaattgcggctattcgtcaggaagaaaagcgcgccgcagaagccaaagcgcgtttcgaagcgcgccaggctcgtctggagcgcgaaaaagcggctcgccttgaacgacataagagcgcagccgttcaacctgcagccaaagataaagatgcgattgctgccgctctggcgcgggtgaaagagaaacaggcccaggctacacagcctattgtgattaaagcgggcgaacgcccggataacagtgcaattattgcagcacgggaagcccgtaaagcgcaagccagagcgaaacaggcagaactgcagcaaactaacgacgcagcaaccgttgctgatccacgtaaaactgccgttgaagcagctatcgcccgcgccaaagcgcgcaagctggaacagcaacaggctaatgcggaaccagaacaacaggtcgatccgcgcaaagccgccgtcgaagccgctattgcccgtgccaaagcgcgcaagctggaacagcaacaggctaatgcggaaccagaagaacaggtcgatccgcgcaaagccgccgtcgaagccgctattgcccgtgccaaagcacgcaagctggaacagcaacaggctaatgccgagccagaacaacaggtcgatccgcgcaaagccgccgtcgaagccgctattgcccgagccaaagcgcgcaaacgggaacagcaaccggctaatgcggagccagaagaacaggttgatccgcgcaaagctgccgtcgaagcggctattgcacgcgccaaagcacgcaagctggaacagcaacaggctaatgcggtaccagaagaacaggttgatccgcgcaaagcggcagttgccgcggctattgcccgcgctcaggccaaaaaagccgcccagcagaaggttgtaaacgaggactaaatggtattcagaatagctagctccccttatacccataaccagcgccagacaagccgcattatgctgttggtgttgctcgcagccgtgccaggaatcgcagcgcaactgtggttttttggttggggtactctcgttcagatcctgttggcaagcgttagtgctctgttagccgaagctctcgtactcaaactacgcaagcagagcgtagccgcagcgttgaaagataacagtgcattgctgacaggcttattgctggcggtaagtattccccccctcgcgccatggtggatggtcgtgctgggtacggtgtttgcggtgatcatcgctaaacagttgtatggcggtctgggacaaaacccgtttaatccggcaatgattggttatgtggtcttactgatctccttccccgtgcagatgaccagctggttaccgccacatgaaattgcggtcaacatccctggttttatcgacgccatccaggttatttttagcggtcataccgccagtggtggtgatatgaacacactacgcttaggtattgatggcattagtcaggcgacaccgctggatacatttaaaacctctgtccgtgccggtcatagcgttgaacagattatgcaatatccgatctacagcggtattctggcgggcgctggttggcaatgggtaaatctcgcctggctggctggcggcgtatggttgctatggcagaaagcgattcgctggcatattcccctcagcttcttagtaacgctggcgttatgcgcaatgttgggctggttgttcagtccagaaacactggcagcaccgcaaattcatctgctgtctggagcgaccatgctcggcgcattctttattttgactgacccggttaccgcttctacgaccaatcgtggtcgtcttattttcggcgcgcttgcgggcttattagtctggttgatccgcagtttcggcggctatcctgacggcgtggcttttgccgtcctgctggcgaacatcacggttcctctgatcgattactacacgcgtccgcgcgtctacggccatcgcaaagggtaaaccatgctgaaaactatccgaaaacacggcattacgttggcgctatttgcagcgggtagtacagggttaactgcggccatcaaccagatgaccaaaacgacgattgctgaacaggccagtctgcaacaaaaggcgttatttgatcaggtgctgccagccgaacgctataacaatgcgctggcacagagttgctatctggtaactgcgccagagttaggtaaaggtgagcatcgggtttacatcgccaaacaggatgacaaaccggcagccgccgttctggaagcaaccgcgccagatggctattccggtgcgattcagctgctggtgggagccgattttaacggcacggtacttggcacgcgcgtgacagagcaccacgaaacgccagggcttggcgataaaatcgaactgcgcctttctgactggatcacccattttgcgggtaaaaaaatcagtggtgcagatgatgcgcactgggcggtgaagaaagatggtggtgatttcgaccagttcaccggcgcgacgattactccccgcgcggtggttaatgcggtaaaacgcgccggattgtacgctcagacgttaccggcacaactttctcaacttcctgcctgtggagaataaagcgtgagcgaaattaaagacgttattgttcaggggttgtggaaaaacaactctgcgctggtccagttgctcggcctttgtcctctgttggcggtcacgtccactgccactaacgctctgggtttaggacttgcgactacgctggtactgacgctgaccaacctgaccattagcacgctgcgtcactggacgccagccgagatccgcattcccatttacgtgatgatcatcgccagcgtggtcagcgctgtacagatgctgatcaacgcctacgcctttggcctgtatcaaagtttagggatttttattccgctgattgtcactaactgtatcgttgtgggccgcgctgaagccttcgccgccaaaaaaggtccggcgcttagcgcactggacggctttagtattggtatgggcgcaacctgcgccatgttcgtgctgggtagtctacgcgaaattatcggcaatggcacattgtttgacggtgcagatgcgctgttaggtagctgggcaaaagtattacgcgtggagattttccacaccgactcccctttcctgctggcgatgctgccaccaggtgcatttattggcctgggactgatgctggcaggaaaatacctgattgatgaaagaatgaaaaagcgccgtgctgaagcagctgcagaacgtgcattgccaaacggtgaaacagggaatgtctgatgaataaagcaaaacgcctggagatcctcactcgcctgcgtgagaacaatcctcatcccaccaccgagcttaatttcagtagcccttttgaattgctgattgccgtactgctttccgctcaggcgaccgatgtcagtgttaataaggcgacggcgaaactctacccggtggcgaatacgcctgcagcgatgcttgaactgggcgttgaaggggtgaaaacctatatcaaaacgattgggctttataacagcaaagcagaaaatatcatcaaaacctgccgtatcttgctggagcagcataatggcgaggttccggaagatcgtgctgcgcttgaagccctgcccggcgtaggtcgtaaaacagccaacgtcgtattaaacactgcattcggctggccgactattgctgtcgacacgcacattttccgcgtttgtaatcgtactcaatttgcgccggggaaaaacgtcgaacaggtagaagaaaagctactgaaagtggttccagcagagtttaaagtcgactgccaccattggttgatcctgcacgggcgttatacctgcattgcccgcaagccccgctgtggctcttgtattattgaagatctttgtgaatacaaagagaaagttgacatctgaagaaaaggggtaacaccgattaccccattgataacctttctttatcctcttttaaaacatctttttaacgtcaatgatgccattgcttagcgttatcatcaggtaatccgtttgcggataaccaaaaatgcaggttaattgtttttttaatagcgaaattttctattcattcgtgatcaagatcacgatgctgtcgcaatgtaaaaacattgcaagaatcaggttaaatcatttaaatttacacacgcaacaaatattgacctacaaaacattacactggctatttttcagaaactggactatctcactagtaaaaacgctaaatagcagaacatatcgccgttaagccatcacccccctctcagtgcagtgaaaaaatctgccgttacgttttttgaaaaatttaacgctggataacatttcccggaatggttgaattccccgcctcagttatatgtaacagattattacaaaggacttgtctgaaagtgcaagatagtgaacattacctgccgtttcccctcccactataacaattgcgcgtatgttttttatacataacgcgagaaagcacccccgttaatatgggatgtaaaaaaagaggtaaaagtgtccactgcaaaccaaaaaccaactgaaagcgtcagtttgaacgctttcaaacaaccgaaggcgttctatctcatcttcagcattgagttatgggaacgttttggttattacggcctacaaggaattatggctgtttacctggttaaacaactgggtatgtctgaagcggatagtatcacccttttctcttcctttagtgccctggtttatggtctggtcgctatcggcggctggttaggtgacaaggtactgggtactaaacgcgtaattatgctcggcgctattgtgctggcgattggttatgctctggttgcctggtctggtcacgacgccggtatcgtttatatgggtatggcggctattgcggtcggtaacggcctgtttaaagctaacccgtcttctctgctttctacatgctatgagaaaaacgacccgcgtctggacggtgcattcaccatgtactacatgtccgtcaacatcggctctttcttctctatgattgctacgccgtggctggccgcgaaatacggctggagtgttgcgtttgcgttgagcgttgtaggcctgctgatcactatcgttaacttcgccttctgccaacgctgggttaaacagtacggtagtaaaccagacttcgagcctatcaactaccgtaacctgctgctgaccattattggtgttgtggcactgatcgctatcgccacctggctgctgcacaatcaggaagttgcgcgtatggcgctgggcgttgttgccttcggtatcgtggttatcttcggtaaagaagccttcgcgatgaaaggtgctgcgcgtcgtaaaatgatcgttgccttcatcctgatgctcgaagccattatcttcttcgtgctgtacagccagatgccaacgagtctgaacttctttgcgattcgtaacgttgagcactccattctgggtctggccgtagaacctgagcagtatcaggcactgaacccgttctggatcatcatcggtagtccgattctggccgctatctataacaagatgggcgataccctgccgatgccaaccaagtttgcaatcggcatggtgatgtgttctggtgcgttcctgattctgccgctgggtgcgaaattcgcgtctgacgctggtatcgtgtctgtaagctggctggtcgcaagctatggcctgcagagcatcggggaactgatgatctctggtctgggtctggcaatggttgctcaactcgttccgcagcgtctgatgggcttcattatgggtagctggttcctgaccactgccggtgcaaacctgattggtggttatgttgcgggtatgatggctgtgccggataacgttaccgatccgctgatgagtctggaagtctatggtcgcgtattcttgcagattggtgtcgctactgccgttattgcagtactgatgctgctgaccgcgccgaaactgcaccgcatgacgcaggatgacgctgcagacaaagcggcgaaagcagccgtagcgtaaaattcagggaaactcttttacaagccgctaacttttcgttagcggctttttttttgttcagcaacgcactaccatactttaaaccacagacaaaaggagttaccgatgaaattgttctacaaaccgggtgcctgctctctcgcttcccatatcaccctgcgtgagagcggaaaggattttaccctcgtcagtgtggatttaatgaaaaaacgtctcgaaaacggtgacgattactttgccgttaaccctaaggggcaggtgcctgcattgctgctggatgacggtactttgctgacggaaggcgtagcgattatgcagtatcttgccgacagcgtccccgaccgccagttgctggcaccggtaaacagtatttcccgctataaaaccatcgaatggctgaattacatcgccaccgagctgcataaaggtttcacacctctgtttcgccctgatacaccggaagagtacaaaccgacagttcgcgcgcagctggagaagaagctgcaatatgtgaacgaggcactgaaggatgagcactggatctgcgggcaaagatttacaattgctgatgcctatctgtttacggttctgcgctgggcatacgcggtgaaactgaatctggaagggttagagcacattgcagcatttatgcaacgtatggctgaacgtccggaagtacaagacgcgctgagtgcggaaggcttaaagtaatagccatcggcccacaggtcgttgtgggccgaaatgagatatttcagagctttgttgcgctgaagtaatgttctggtttggcaatacgatcctgagcagccaccacttgcagctcatattcctgcattgctttggtggtcaccatgatttcgtagactgcagcggtcacatgttccagcgcctcctgcagcgttgccccctgaagcagtttcaccagcagtaaaccgctcgtcacatcaccaacacctaccggctggcgcataccaaaatccaccagcggacggctgatatgccaggcttcatcggcggtgaccagcagcatttcaaaacggtcacggctgtagccagctcgcgccaggtgtttaaccaacacaatttgtggcccttgcgcaatgagttcgcgcgctgccagaaccgcttcttcgacgttatttaccgcatgctcacagagtatttccagctcaaccagatttggcgcaatgatatcgctggcaggcaaaccgtgccgcacatgaaactctgcgacacccggtgcaacgatacagcctttttccggatgacccattaccggatcgcaaaaatatttcgcctgcggattcgcggctttcacctgacggacgataccgaggatatgttcaccctgctccgcgcttcccagatagccacttaatacggcatcacaggtgtgtaatttatcaatggcggcaatgccttgcacaatttcggttaaatggctgggcggcatcacgcagccagtccatttgccgtattgggtgtgattagaaaattgaacggtgttcagcggccagacgttcgcgcccaggcggcgcatcggaaactctgccgcactgttacccgcatgaccataaacaacgtgagactggatagcgagaatatttttcatcatgttccctgtataaaaaccagggggagtgatttctcactccccctttccacttaatgcattatttccagcaaatcagacagtaattctttttaccgcgacgcagtaaggtaaaacgaccaaacagacgatcttcttctttaaagaagtattcaggatcggactgtttttcaccgttaatggtgatggcattggaggcgatagttttacgtgcctgaccacgggaaggttgcagttcagaatcgaccagtgcctgcatcaggtctgcgcccttttccatctcaaccatcggtacgccgtcctgcgccagctgttcgaagtccgcttcactcagcgcactcaaagaaccgctgaacaggcattcggtaatacgttttgccgcctgtaaaccttcttcaccgtgaaccagacgagtcacctgctccgccagtacatactgggcgcgcggtgctttaccgctgtttttatcttcttcttccagggcgttgatctcttcaatgctcataaaggtgaagaacttcaggaagcggtaaacgtcggcatccgcagtgttgatccagaactggtagaatttgtacgggctggttttcttcggatccaaccagactgcgccgccttcagttttaccaaatttggtgccatctgctttagtgatcagcggaacggtcaggccaaacacctgattctgatgcagacgacgggtcaggtcgataccagaagtgatgttaccccactggtcagaaccaccaatttgcagcaccacaccgtactgtttgttcagacaggcgaagtcataaccctgcaacaggttgtaggaaaactcagtgaagctaatcccctgatcttcacggttgagacgctgcttaaccgcttctttgttgatcatctggttaacggagaagtgtttgccaatatcgcgcaggaaggtcagcacattcatattgccgaaccagtcatagttgttcgccgcgatagcagagttttctccacagtcgaaatcgaggaacggggcaacctgcttacggattttgtccacccactcctgaacagtttcttcggtgttcagcttacgctcggcagctttgaagctcgggtcgccaatcagacccgtcgcgccgcctaccagcgcaaccggcttgtggcccgcctgctggaagcgtttcaggcataacaatggaacaagatgccccaaatgcaagctgtcagcggtaggatcgaagccgcaatagagcgcgatcgggccttgcgccagtcgctctgctaacgcttcctcgtccgtcacctgggctaccagcccccgctcttgcaattgtttaatcaagttactgcttgccatcaaaatctccatgtatataacgactgcacctttgccggtacacgacttttcgccagatgcgaaagagacatagaataaagtgccagaatcaggagtaccagcgattaaagcaagatttttgcatcttttcagggtgcaagacgatcaatcttccacgcatcattttcacgctggtacaaaaagcggtcatgcaggcgatgctcaccaccctgccagaactcaatctgttcaaggctgacgcgaaaaccgccccaaaagctcggcaatggcacttcgccctgttgaaacttctgcttcagctccaggaatttactttcaaggataccgcgggcagaaatgcgactggactgcttgctaacccatgcaccaatctggctatcacgcgggcggctatgaaaatatttcatcacttcgagagtgctaagtcgttctgctttaccgatcaccatcacctggcgctcaagggtatgccacgggaacagcaggctaacgcgcggattattttcgatttgatgtgctttacggctgccgaggttggtgtaaaacaccatgcctttttcgtcgtaatgtttgagtaaaacgatgcgctgataaggctgaccatgttcatccacggtagcgaccaccatcgcggtagggtccgccagtttggcttcacaagcctgagagagccaacgttcaaaaagggttaatggatcggcgggaagatcgcggcggcgtaacccgcctttggtgtattcacggcgcagatgcgcgatttgctgcaattcgtcgttatcagacatggttttctttacggattgtcagtgggtgacgctattgtgcgccgcccctggaaaaatctcaacgctgtggattttgtaactgacagttattcaagacgatgcggtcgcgtttatagacagtcgcttcatcgcctttgctccagaaaacatagattccgtcagtgtaacgcgcgccagaggcactaatgccctgtttgagatgcagtagttgattatcgtaaacaaaactgacctcctggcgcggattattcagtttgaccgtcaacggtttttcatcacactggtattccagcgtatcggtttgcatgcgctcaaccagctgattaaaggcgctacagccggagagaaggaccggcaaaatgataattaacagttttttcatagtcatatcccgaagactttcctggtctggagggcaatacgccctccctaacgttccaagtgtaacggcagacgcggtaagaaaaattcagttaactctgatatcacgggttagcggggaaaatagcccccagtaccgtctcctggcttgcgccagtgacggaaggcagatttcctggtaatcccgccagcgtccgccaggcaagccaggcgaaagccaatgcttccatgtcatcgccactaatgccaacggcatcggtggtggtgacttctgtgcctggcagtaatgccgccagacgcgccatgagtagcggattacgactacctccaccacataccatcaatcgttcgcagccaccgctcaacaaaacttgttcagaaatggtcacggcggtgagttctgccagtgtcgcctgcacatctcggggatcaacacccggaaaatggcgcaaatggcgctccagccaaccatagttaaagtattcgcgtccggtgcttttcggtgcaggttggctgaaatacgggtcgctgagcatattttgcagcagtgggagaataactttacccgcccgtgcccactcggcatctttatcgtaaggtttaccggcctgacgccagatccaggcatccatcagcatgttaccaggaccggtatcgtagcccccaaccggctgcccaggaatgagcagactcagattggcgatgccgccaatattgagcaccattcgtcgctcggttgggtgagccagcagcgcatgatggaacgcaggtaccagcggtgcgccttgtcctcccaaggcaatatcgcgacggcgaaaatcaccgacaaccgtaattccggtgcgtgccacaatttgattgttatcgccaatctgtaaagtgtgtggtgccacgcccgtcggttcatgccagacggtttgaccgtgacaaccgatcgcaactatatctcttgcctgcagattttgttccttaagcaaggcattgaccgcatcagcaaaaagttgcccgagttgagtatcaagctgtccaaactggctaagtgtaagctgctggccctggcaaatatccagtacagcctgtttcagagataccgggatcggccaactcaaacttgccagctgtgcgacccggtgttcatcaattgtcgccaacacaacatcaacaccatcaaggctggtgccactcataacgccaataaagcggccgcttttcatagttcatcctttttcaatctgacgtttgcgcaccactcaaacataaacttttcgtgaataccatgcggaatgaccgatttttaccgttggtagtaaaacattatcttcaaatcaataatcatcatgaatgttttgtttataattggttgatcctactttcattatgatttgctcatatttggtagaacatgtaaccatggattcacatatgccatatactttgaccatgagggatgcttgcgtggcgtttcatggtgaacaggagatttttcaatgattaaacgcgtattggttgttagtatggtaggtctgtctcttgtcggttgtgttaataacgacaccctgagtggggatgtttataccgcttctgaagcgaaacaagtacagaatgtcagctatggcaccatcgttaacgtacgtccggtacagattcagggcggtgatgattccaacgttatcggtgcaattggcggtgctgttcttggtggtttcctggggaatactgttggtggcggaaccgggcgttctctggctactgcagcaggcgctgttgcaggtggcgtagctggtcagggcgtacagagtgcaatgaacaaaacgcagggtgtcgagctggaaattcgtaaagacgatggtaataccatcatggtggtacagaaacaaggcaacactcgtttctctccgggccaacgtgtcgtactggccagcaatggcagtcaggtgaccgtttctccgcgctaaataagtttgcgtgtggtcaggttactgaccacacgcccccttcatttcaccctttggcctgtaactcaatgatattatgctcaagttttgcgatgagcgtaatcagttgctccagttcctctgcggagatgccatgtaatatttccgcgcgggttttgttaataacagcttccatttcgctgatcagcggctctgccttttccgtcagtttaatacgtttagcccgacgatcgctggcacaagtttgacggctaattaaccctttttcttccagttggtccagagtacggaccagacttggctgctcgatgccaatcgcttttgccagttgaatttggctctggtctggaggtaactgatggatattgtgtaacgtaacccaatgggtttgtgttaactccagcggtttcaggcgatggtctatcagagcacgccatatgcgcaccaaccgtgccagatcagaacctagtgggctttccaatttcatctccttataattagcttgctaagatattatgcggcttttagaatagtgtgcagcaattgtattgctaaaacaaatgtattgctgcatttggttaccgtcagacatatttttcagaaattgcgcgtaaatttttcgcacttaaagaatatttattaatctaacgcaatatattcggtcgtaaaggaatctactttgtgaagtttatgctcaatgcaacaggattgcccttacaagatctggtgttcggtgcgtccgtctactttcctccgtttttcaaagcattcgcgtttggattcgtcatctggcttgtcgtacaccgcctgcttcgtggctggatctacgccggtgacatctggcatcccttgttaatggatttaagcctgtttgcgatttgcgtttgccttgctctggcaatactgattgcgtggtaactatgagtattaaaacaattaagtatttcagtacaatcattgtagcggtagttgcggttcttgccggatggtggctgtggaattattacatgcaatctccgtggacacgcgacgggaaaatacgcgcagaacaggtttctatcaccccacaggtgagcggacgtattgttgagctgaatataaaagacaaccagctggttaacgcgggggatcttctgctcacgatcgataaaacgccctttcagatcgccgagctgaacgcacaggctcagctggcgaaagcgcaatctgacctcgcaaaagccaataacgaagcgaatcgtcgtcgtcatctcagtcaaaattttatttctgccgaagaactcgataccgctaacctcaatgttaaagcgatgcaggccagtgttgatgccgcacaggcgacgctgaaacaggcacaatggcaactggcgcaaacggaaattcgcgccccggtgagtggatgggtgactaaccttactacccgcatcggcgattacgctgataccgggaaaccgctgtttgcccttgtcgacagccacagcttttacgtcattggttattttgaagaaaccaagttgcgccatatccgcgaaggtgcaccagcacaaattaccctctatagtgataacaaaacgttacagggtcacgtttccagtatcggtcgggcgatttatgatcagagcgttgaaagtgacagtagccttattccggatgttaaacctaacgtcccctgggttcgactcgcccaacgcgttcccgtccgctttgcgctggataaagtcccaggcgatgtcacgttggtgagcggcaccacctgtagcattgccgtaggtcaataatgaacgcaagcagttggtccttgcgcaatttgccctggttcagggccacgctggcgcaatggcgttatgcgttacgcaataccattgccatgtgtctggcgctgacggttgcctattatttaaatctggatgaaccctattgggcgatgaccagcgctgcagtggttagctttcccaccgttggcggtgttatcagcaaaagcctcggacgcatcgctggcagtttgctcggagccattgcggcactgcttcttgccgggcatacgctcaatgagccgtggttttttctattgagcatgagcgcgtggcttggcttttgtacctgggcctgtgcgcacttcacgaataacgtcgcgtatgcatttcaactggcgggctacacggctgccatcatcgcctttccgatggttaatattactgaggccagccagctgtgggatatcgctcaggcgcgcgtttgcgaggtaatagtcggtattttgtgcggcggcatgatgatgatgatcctgccgagcagttccgatgctactgcccttttaaccgcattgaaaaacatgcacgcccgattactggaacatgccagtttactctggcagcctgaaacaaccgatgccattcgtgcagcacatgaaggggtgattgggcagatactgaccatgaatttgctgcgtatccaggctttctggagccactatcgttttcgccagcaaaacgcgcgccttaatgcgctgctccaccagcaattacgtatgaccagtgtcatctccagcctgcgacgtatgttgctcaactggcccagtccgccaggtgccacacgagaaattctcgaacagttgctgacggcgctcgccagtagccaaacagatgtttacaccgtcgcacgtattatcgccccgctacgcccgaccaacgtcgccgactatcggcacgtcgccttctggcagcgactacgttatttttgccgcctttatctgcaaagtagtcaggaattacatcgtctgcaaagcggtgtagatgatcataccagactcccacggacatccggcctggctcgtcataccgataacgccgaagctatgtggagcgggctgcgtacattttgtacgttgatgatgattggcgcatggagtattgctagccaatgggatgccggtgccaatgcattaacgctggcagcaattagctgcgtactctactccgccgtcgcagcaccgtttaagagcttgagtcttctgatgcgcacgctggtgttacttagcctattcagctttgtggtcaaatttggtctgatggtccagattagcgatctgtggcaatttttactgtttctctttccactgctggcgacaatgcagcttcttaaattgcagatgccaaaatttgccgcattgtgggggcaactgattgtttttatgggttcttttatcgctgtcactaatcccccggtgtatgattttgctgattttcttaacgataatctggcaaaaatcgttggcgtcgcgttggcgtggttagcgttcgccattctgcgtccaggaagcgatgctcgtaaaagccgccgccatattcgcgcgctgcgccgggattttgtcgatcagctaagccgccatccaacactgagtgaaagcgaatttgaaagcctcacttatcatcacgtcagtcagttgagtaacagccaggatgcgctggctcgccgttggttattacgctggggtgtagtgctgctgaactgttctcatgttgtctggcaattgcgcgactgggaaagccgttccgatccgttaagccgagtacgggataactgtattagtctgttgcggggagtgatgagtgagcgtggcgttcagcaaaaaagtctggcggccacacttgaagaattacagcggatttgcgacagccttgcccgtcatcatcaacctgccgcccgtgagctggcggcaattgtctggcggctgtactgcagccttagccaacttgagcaagcaccaccgcaaggtacgctggcctcttaattacttaattacaccacaggcatagcgttcaccgccaccgcccagcggtttaggttgatcggacatattatcgccgccaacgtggaccatcagcgctttgtctttgatttcatccagacttttcagacgaggcgcgatgacggcatcggtagctttgccgtcattattgacgaccagtgcaggcagatcgcctaaatgcccggcaccttctggcccttcatgtttaccggtattttgtggatcaagatgcccgcctgcggattccgcggcgctggctttgccatctttggtggctggctggcagcttcctttggcatgaatatggaagccatgttcaccggggggtaatgctttcagatcggggctaaactccagacctttatcggtttcagtaatggtgacgctaccaatactctgccctaccccttggctcgtgacgaggttcatctcgactttttcactggcagcttgtgcgccggttgcaacaaccagcgccagaatagccagactaaaacgtttcataggacctccgttcattgtgcattcctgaataagtgtaaaccagtgacacatttttgaacggcggctattcctaaaagtgcttacggtacgtcgtaccccagtgccgctttacggatacgaaaccattgttgacgggtcattttcagtgtttctgcttcgacagctgcccgtacgcgctcaattttaccactaccgataattggcagcggctggcttggtaaacgtaatacccaggcgtaaaccacctgttcaatgctgcccgcgtttaactcctctgccaccacagccagttcatcacgcagcggctggaaataatcatcattaaacagacgaccaccaccaaggcaggaccacgccatcggacgaacacgcagttgttgtagttggtcgagcgtgccatccagcagtaacggctgatgcaccggggatatttccacctgattagtggcaagggtaaacggcagacgactttgcaacagggcaaattgcgcaggcgtaaagttgcttacgccaaaatgacgcactttgccgctctgatgcagatgtttgaacgcgtccgccacttcatcggcatccattaacgggtctggtcggtggattaacagcaaatccagatgatcggtcgcgagattaattaggctctgttcggcgctcttaatgatgtgatcgcggtcagtgatgtaatgaccaatgacgttttcttcacgcgcggtcgtcgcgataccgcatttactgacgatttccatccgttcacgcaggtgaggtgccagtttcagtgcctcgccaaacgccgcttcgcactgatagccaccataaatatcagcatggtccacggtggtcacgccgagatccagatgctcttcaataaaactgaccagctggcgggcggacatattccagtccatcaatcgccagtagcccatcacaaaacgggaaaactccgggccttgcggcgcaatagtaatacgctgaaccataatcgcttcctcttatcagatatgagaggagtatacgcaagattaggttcaaaagagacttggttgctccggttcgtcactactcgctggcttatttgcgcgtaatttgcgcattaatcgctgccgacaaaggcgcagcacctcttgtttttcgccatcgctcattttattccagttaaaacgctcatcacgactacgaaaacagccgcgacaaaacccgcgttcgtcagactggcaaattccccggcacgggctctggacgggaaagaactctaattgctccgccacttcgccctcctcagataagattattaccattattgaagctgttaatgtccaaagtagcaactttgcttgcactagaccgactggtctactacactccaacgcatgaacaaacacaccgaacatgatactcgcgaacatctcctggcgacgggcgagcaactttgcctgcaacgtggattcaccgggatggggctaagcgaattactaaaaaccgctgaagtgccgaaagggtccttctatcactactttcgctctaaagaagcgtttggcgttgccatgcttgagcgtcattacgccgcatatcaccagcgactgactgagttgctgcaatccggcgaaggtaactaccgcgaccgcatactggcttattaccagcaaacactgaaccagttttgccaacatggaaccatcagtggttgcctgacagtaaaactctctgccgaagtgtgcgatctgagtgaagatatgcgcagcgcgatggataaaggtgctcgcggcgtgatcgccctgctctctcaggcgctggaaaatggccgtgagaaccattgtttaaccttttgtggcgaaccgctgcaacaggcacaagtgctttacgcactgtggcttggcgcgaatctgcaggccaaaattagccgcagtttcgagccactggaaaacgcgctggcccatgtaaaaaacattattgcgacgcctgccgtttaacaggcattttttatcaccagacgaccgggagcctttatgagttctgaaaaactgtattccccactgaaagtgggcgcgatcacggcggcaaaccgtatttttatggcaccgctgacgcgtctgcgcagtattgaaccgggtgacattcctaccccgttgatggcggaatactatcgccaacgtgccagtgccggtttgattattagtgaagccacgcaaatttctgcccaggcaaaaggatatgcaggtgcgcctggcatccatagtccggagcaaattgccgcatggaaaaaaatcaccgctggcgttcatgctgaaaatggtcatatggccgtgcagctgtggcacaccggacgcatttctcacgccagcctgcaacctggcggtcaggcaccggtagcgcctagtgcacttagcgcgggaacacgtacttctctgcgcgatgaaaatggtcaggcgatccgtgttgaaacatccatgccgcgtgcgcttgaactggaagagattccaggtatcgtcaatgatttccgtcaggccattgctaacgcgcgtgaagccggttttgatctggtagagctccactctgctcacggttatttgctgcatcagttcctttctccttctagtaaccatcgtaccgatcagtacggcggcagcgtggaaaatcgcgcacgtttggtactggaagtggtcgatgccgggattgaagaatggggtgccgatcgcattggcattcgcgttagtccaatcggtactttccagaacacagataacggcccgaatgaagaagccgatgcactgtatctgattgaacaactgggtaaacgcggcattgcttatctgcatatgagtgaaccagattgggcggggggtgaaccgtatactgatgcgttccgcgaaaaagtacgcgcccgtttccacggtccgattatcggcgcaggtgcatacacagtagaaaaagctgaaacgctgatcggcaaagggttaattgatgcggtggcatttggtcgtgactggattgcgaacccggatctggtcgcccgcttgcagcgcaaagctgagcttaacccacagcgtgccgaaagtttctacggtggcggcgcggaaggctataccgattacccgacgttgtaatccaacattgcgagcggcgtaaagccgccgctatactaaaacaacattttgaatctgttagccattttgaggataaaaagatgcgtcttcttcataccatgctgcgcgttggcgatttgcaacgctccatcgatttttataccaaagtgctgggcatgaaactgctgcgtaccagcgaaaacccggaatacaaatacagtctggcgtttgttggctacggcccggaaaccgaagaagcggtgattgaactgacctacaactggggcgtggataaatacgaactcggcactgcttatggtcacatcgcgcttagcgtagataacgccgctgaagcgtgcgaaaaaatccgtcaaaacgggggtaacgtgacccgtgaagcgggtccggtaaaaggcggtactacggttatcgcgtttgtggaagatccggacggttacaaaattgagttaatcgaagagaaagacgccggtcgcggtctgggcaactaatctcctgccgggcgtgaactcatcgcgcccgcatctttactgcatcgacaagtaatatttgtcataatgcgcgctgcaatttatccgtattaagagaatcagatgtccgataacgctcaacttaccggtctgtgcgaccgttttcgtggtttttatcctgttgtgatcgatgttgaaacagccggatttaacgccaaaaccgatgcgctgcttgagattgccgccatcaccctgaaaatggatgaacaaggctggctgatgccggacaccacattacatttccacgtcgaaccatttgtcggcgcaaatttgcaaccagaagccctcgccttcaacggcattgacccgaacgatcccgatcgcggcgcggtcagcgaatacgaggcgctgcacgaaatttttaaagttgtacgtaaaggtattaaagcgagcggctgtaaccgcgccattatggtggcgcacaatgccaattttgatcacagctttatgatggccgccgcagaacgcgccagtctgaaacgtaacccgttccaccctttcgccacttttgacactgctgcactggccgggctggcactcggacaaaccgtattgagtaaggcttgccagaccgctggcatggacttcgacagcacccaggcgcactccgcgctgtacgacaccgaacgcactgctgtgctgttttgtgaaatcgtcaaccgctggaaacgtctgggaggctggccgctatctgccgccgaagaggtgtaatcgagtcgatgcctgatgacatgcaatgattcaggcatctatagtgaggctattccacgcatcctgcatgatattcacggggaatagcgttaatggcagataatccagaccctagtagcctcctgccggacgtgtttagtccggcgacccgcgactggtttcttcgcgcctttaaacagccgaccgctgtccagccgcaaacctggcatgtggcggcgcgaagcgaacatgcgctggtgattgcaccgaccggctccgggaaaacgctggcagcatttctctacgccctcgatcggctcttccgcgaaggcggcgaagatacccgcgaggcgcataagcgtaaaaccagtcgcatcctctatattagtccgataaaagccctgggcaccgacgttcagcgcaacttgcagatcccgttgaagggtattgccgatgaacggcggcggcgcggcgaaacggaagtcaatcttcgcgtagggatccgtactggcgatacgcctgcacaggaacgcagcaaactcacccgtaatccgccggatattctgatcaccacacccgaaagtctctatctgatgctgacctcccgcgcgcgcgaaacgctacgcggcgtcgaaacggtaattattgatgaagtccacgcggtagcgggcagtaaacgtggtgcgcatctggcgttaagtctggagcggctcgatgcgctgctccacaccagtgcacagcgaattggcctttctgccactgtgcgcagtgccagcgatgtggcagcatttcttggtggcgatcgcccggttacggtagtcaacccgcccgcaatgcgccatccgcagatacgaattgtcgtaccggtcgccaatatggatgatgtcagtagcgtcgccagcggcaccggcgaagacagccatgccggccgggaaggctccatctggccatatattgaaacgggtatccttgatgaagtgttgcgccatcgcagcaccattgtctttactaatagccgggggctggcggaaaaactgacggcacgattaaatgagctttacgccgcacgcttacagcgttccccgtctatcgccgttgatgcggcccatttcgagagcacctccggcgcaacctctaaccgtgtacaaagtagcgacgtttttattgcccgcagtcaccacggctccgtctctaaagaacaacgagcaatcaccgaacaggcgctgaaaagcggtgaattacgctgcgtggtcgcaacctccagtcttgaactggggattgatatgggcgcggtggatctggtgattcaggtggcaacgccgctttctgttgccagtgggttacaacgcattggtcgcgccggacatcaggttggcggtgtatctaaagggctgtttttcccccgtacccggcgtgatttagtcgattccgcagtcattgtagagtgtatgttcgcaggcaggctggaaaacctgacaccaccgcataatcctctcgacgtccttgcgcagcaaaccgttgccgccgcggcgatggatgcattacaggtagacgaatggtactcccgcgtacgccgtgccgcaccgtggaaagatctgccaagacgtgtttttgacgccacgctggatatgctttccgggcgctatccctctggcgatttttctgcttttcgccccaaactggtctggaacagggagaccgggatattgaccgcccgacctggcgctcaattgttggcggttaccagcggcggcaccattccggatcgtggcatgtatagcgtgttattacccgaaggtgaagaaaaggccggtagccggcgggtgggtgaactggatgaggagatggtatatgagagccgggtgaacgacattatcactctcggcgctaccagttggcggatccagcaaatcacccgcgatcaggtgattgtgactcctgctccgggtcgttctgcccggctccccttctggcgtggtgaaggtaacggacgtccggctgaattaggcgagatgatcggcgattttcttcatttgctggcggatggcgcgttcttttccgggactattcccccgtggctggcagaagaaaatacgatcgccaatattcaggggttgattgaggagcagcgcaacgcgacgggcatcgttccggggagtcgccatctggtcctcgaacggtgccgtgatgaaattggtgactggcgtattattttgcactctccctatggaagacgggtgcatgaaccctgggcggtggcgattgccgggcgaatacatgcgctatggggcgctgacgcgagcgtggtcgccagtgatgacggcattgttgcacgtattcctgacaccgatggtaaattgcccgatgccgcgatttttttgtttgaaccagaaaagttgctgcaaattgtccgcgaggcggtaggcagcagcgcacttttcgccgcccgttttcgcgaatgcgccgcgcgggcattattaatgccggggcgcactccgggccatcgcaccccgctttggcaacaacggctgcgcgccagtcagttgctggaaatcgctcagggatatccggattttccggtcattctcgaaaccctacgcgaatgtctgcaagatgtttatgatcttcccgcactggaacgtttgatgcgtcgcctgaacggtggcgaaattcaaatatccgatgtaacgaccactacgcccagccctttcgccacaagtttattgttcggctatgtcgcggaatttatgtaccagagcgacgccccgctggcagagcgccgggcatccgtactgagcctggacagcgagttactgcgcaatctactcggacaggtcgatccgggggaattactcgacccgcaggtcattcgccaggtggaagaagagttgcaacgactggctcctggcagaagagcgaaaggtgaagaaggattgttcgacctgctgcgcgaactggggccaatgaccgttgaagacctggcgcaacggcatacaggcagcagtgaagaggttgcgagctatctggaaaatcttcttgcagtaaaacgaatcttcccagcgatgattagcggacaggagcgtcttgcctgtatggatgatgccgccaggctgcgtgatgccctcggcgtacgactaccagagagtttgccagagatttatttacatagagtcagttacccgcttcgcgacctctttctgcgctatctccgggctcatgctctggtcacggctgaacaactggctcatgagtttagtctcggtattgccattgtcgaagagcagcttcagcaactgcgtgaacagggtctggtgatgaatctgcaacaagacatctgggtgagcgatgaagtatttcgtcgtctgcgtttgcgcagcctgcaagccgccagagaagcgacgcgtcccgttgcagccacgacctatgcgcgattgctgctggaacgtcagggcgtattacccgccaccgatggtagcccggcgctctttgccagtacaagcccaggcgtttatgagggcgtagatggcgtgatgcgggtgatcgaacagcttgccggagtcggtttacccgccagtctctgggaaagccagatcctgcctgcccgcgtacgcgactatagcagtgaaatgctcgatgaattactggcaaccggtgcggttatctggagcgggcaaaaaaaactgggtgaagatgacggcctggtggcactgcatctacaggaatatgctgcagaaagcttcactcccgccgaagcggatcaggcgaatcgtagcgcgctgcaacaagcgatagtcgctgttctggctgacggaggagcctggtttgcacaacaaatcagccaacggatacgcgacaaaatcggcgaaagcgttgatctctctgccctgcaagaggcgttatgggcgctggtctggcaaggcgtcatcaccagcgacatttgggcaccgttacgcgccctcacccgcagcagttccaacgcacgcaccagtactcgccgcagtcaccgggctcgtcgtggacgtcctgtctatgcgcaacccgtcagcccgcgggtatcttacaacacaccaaatctggctggacgctggagcttattgcaggtggagccactaaacgataccgaaaggatgctggcgctggcggaaaatatgctcgaccgctacggcatcatcagtcgtcaggcggtgatagccgaaaatatccctggcgggtttccaagcatgcaaacgctttgtcgaagtatggaagactccgggcgaattatgcgaggtcgttttgtagaaggtctgggtggcgcgcaattcgctgaacgtctgactattgaccgattgcgcgatctggcgacacaagccacgcaaacgcgccactatacaccagtggcgctctctgccaacgatccggctaatgtgtggggaaatcttctgccctggcctgcacatccggcaacgctggttccaacgcgtcgggcgggtgcgctggtggtcgtttctggcggcaaattgttactctatctggcgcaaggtggcaaaaaaatgctggtctggcaggaaaaagaggaattactcgccccagaggttttccacgcgctgactaccgcactgcgtcgcgaaccacggctgcgctttacgctaacagaagtgaatgatctaccggtccggcaaacgccgatgtttacgctgctgcgtgaggcgggatttagtagtagcccacaagggctggattggggataaagaaaggactgacggatgcccgttcgcatccgtcagtattgcaggacggattattccgcgtccggctcttcagacttgtatttagcggcagtttctttgatcagctgctgcagttcgccacgctgatacatttcgatcacgatatcacaaccgccgaccagctcgccgtcaacccacagttgcgggaaggtcggccagttagcatatttcggcagttccgcacgaatgtccggattctgcagaatatcaacataggcaaaacgttcgccacatgcggcaagcgcctggactgcctgggcagagaaaccgcagctcggcagtttcggactacctttcatgtacagcaggatcgggttttcagcaatctggcgttggattttttcgatagtggtgctcattgtcttgcttcctcaaacttctttacggcagtaatctgacattgtagcgggtcagtgcggcatcggaaaataacattttcatcacgcttttgctattttatccctttgctctatttgttgcatttcaaatattcgtttcttctctgatgccggcaaactggcgtatttataaccatttttagctttcactgctgcatttttttgcgctcgccaacgaaacgtattttttaacaataaaagctattaactttctcttcttctatgcattagaatcatcaagttttgtaaatcagacgcaggcatgatagacctgcctttacagagggacgctcagtggcgcggataaaccgtattagcatcacgctctgtgctttactttttaccaccctgcctttaacgcctatggcccatgctagtaagcaagccagggagagttctgctaccactcatatcaccaaaaaagcagataaaaagaaaagcacggcaaccaccaaaaagacccagaaaacagcgaaaaaagccgccagtaaaagtacgaccaaaagcaaaaccgcttcttccgttaaaaaatcttccattaccgcttctaaaaacgccaaaactcgcagcaaacacgccgtcaataaaacggccagtgccagctttaccgaaaagtgtaccaaacgtaagggctataaaagccattgtgtgaaagtcaaaaatgccgcgagtggaactcttgccgacgcgcacaaagcgaaggtgcaaaaagctacgaaagtggcaatgaataaactgatgcagcaaattggtaagccatatcgttggggtggcagcagtccgcgtaccggttttgattgcagcggcctggtttattacgcttataaagatttggtgaaaattcgtattccgcgtacggcgaatgaaatgtatcacctgcgtgatgcagcgccaatcgaacgtagtgaactgaaaaacggcgacctggtctttttccgtactcagggacgcggcacagccgatcatgtcggcgtgtatgtcggcaacggcaaatttattcagagtccgcgcacaggtcaggaaattcaaatcacttctctcagtgaagactactggcagcgccactatgttggcgctcgtcgggtaatgaccccaaaaacacttcgctaaaactttaccctgttgttacggcaacagggtaagttcatcttttgtctcaccttttaatttgctaccctatccatacgcacaataaggctattgtacgtatgcaaattaataataaaggagagtagcaatgagtttcgaattacctgcactaccatatgctaaagatgctctggcaccgcacatttctgcggaaaccatcgagtatcactacggcaagcaccatcagacttatgtcactaacctgaacaacctgattaaaggtaccgcgtttgaaggtaaaagtctggaagagattattcgcagctctgaaggtggcgtattcaacaacgcagctcaggtctggaaccatactttctactggaactgcctggcaccgaacgccggtggcgaaccgactggaaaagtcgctgaagctatcgccgcatcttttggcagctttgccgatttcaaagcgcagtttactgatgcagcgatcaaaaactttggttctggctggacctggctggtgaaaaacagcgatggcaaactggctatcgttagtacctctaacgcgggtactccgctgaccaccgatgcgactccgctgctgaccgttgatgtctgggaacacgcttattacatcgactatcgcaatgcacgtcctggctatctggagcacttctgggcgctggtgaactgggaattcgtagcgaaaaatctcgctgcataataactgatggcaaatgcagcattgcctgaagcgctacgcttatcaggcctacgcggatcatcgatgtaggtcggataaggcactcgccgcatccggcaagataaatcgcacgttgtcagcaactgtaacgcagaaggttatccttctgcgtttttgtttaattagctgttagcaacgcaaactgtttcaggttgttttctggcactcataaacaccagcaataatgccagtcccgcgacaatcgctcccatcaccggcacaaagctgtatcccagcccagcggaaattaccgcaccaccagcagctgctcccagcgcatttccaagattaaaggcaccaatattgacactactagacagacctggcgcttcactggcgacacgcatcacgcgcatctgtaacggcggtacgaccgcaaaggttgctgcgccccacaccaccatgctaatagctgcgccgaactcattgcgggccaggaacgggattgccagcataatcaccatcaacaacaacaaaaagcctttcaacgtgccgttaacactacgatctgccagtttgccgccgagatagttaccgatagagaatccgacaccaatcagcaccagcattgccgtgacgaacaccggtgttgcgtgggtaatactttgcagtaccggagagatataggtgtagagagtaaacattgcaccagctcccagtaccgtcgtcagcaatgcagacagcacctgcggacgcattaataccgccagctcttttttcacttcaggtcgtgcccctgcaccacctttaggtaaactgaagaacagacttaccatactaatcactcccagccccgccgttgccagaaaactcatccgccagccgatggtttcacccaaccaggtcgccgccggcacgccaccgatatttgccagggttaaccccataaacatagtggcaactgcgctggcctgtttatgttttggcaccacgcttgcggccacgacactacccaaaccaaaaaatgctccgtgattcaggctggtcaaaatgcgactaagcatcagggtcatataatccggcgcgatggcggaaagtacgttgccgagcgtgaaaattgccatcaggaaaatcaacgcactgcggcgggcacgatgagaaagtagaagcgtcatcagcggcgcgccaaccattacgccaactgcataggcactgattaacattccggcagcgggaatgctgacatccacaccgcgcgcaatgacgggcaacaagcccattgggctgaactccgttgtcccgataccaaacgcgccaatcgccagcgccagcaacggatagttaattttcatgccttatctccacctcttcgcgtcattacgcgatattcattaaagtggcgaaagcatgacagcaatcacaaaaaaatgaaaataacaaaaagagaaaacacttttgccattttgctaacaaacaggaaggagatgcgagggagaacgcgctccctcgagaggaaatcagtgcagcgcggcagtcaaacccacggctacgatcaaaccgaggacgataatcgttgttaccagtgaaaatttaaggtcggtgctcatcaagttttctccttttttattaccacacaaaaagtgatattacgcatttttacacactgtgatgaaaaaatctcccgtcatttataatgataagtgtttttaccacttccccttttcgtcaagatcggccaaaattccacgcttacactatttgcgtactggccattgaccccttcctgacgctccgtgtcgtttttccggcgtaccgcaacacttttgttgtgcgtaaggtgtgtaaaggcaaacgtttaccttgcgattttgcaggagctgaagttagggtctggagtgaaatggaatggcaacaataaaagatgtagcgaaacgagcaaacgtttccactacaactgtgagtcacgtgatcaacaaaacacgtttcgtcgctgaagaaacgcgcaacgccgtgtgggcagcgattaaagaattacactactcccctagcgcggtggcgcgtagcctgaaggttaaccacaccaagtctatcggtttgctggcgaccagcagcgaagcggcctattttgccgagatcattgaagcagttgaaaaaaattgcttccagaaaggttacaccctgattctgggcaatgcgtggaacaatcttgagaaacagcgggcttatctgagcatgatggcgcaaaaacgcgtcgatggtctgctggtgatgtgttctgagtacccagagccgttgctggcgatgctggaagagtatcgccatatcccaatggtggtcatggactggggtgaagcaaaagctgacttcaccgatgcggtcattgataacgcgttcgaaggcggctacatggccgggcgttatctgattgaacgcggtcaccgcgaaatcggcgtcatccccggcccgctggaacgtaacaccggcgcaggccgccttgccggttttatgaaggcgatggaagaagcgatgatcaaggtgccggaaagctggattgtgcagggtgactttgaacctgaatccggttatcgcgccatgcagcaaatcctgagccagccgcatcgccctactgccgtcttctgtggtggcgatatcatggcaatgggcgcactttgtgctgctgatgaaatgggcctgcgcgtcccgcaggatgttagcctgatcggttatgataacgtgcgcaacgcgcgctattttacgccggcgctgaccacgatccatcagccaaaagatagcctgggtgaaacagcgttcaacatgctgttggatcgtatcgtcaacaaacgtgaagaaccgcagtctattgaagtgcatccgcgcttgattgaacgccgctccgtggctgacggcccgttccgcgactatcgtcgttaatcacccgttgcgggagtctcttccggctcccgcagccactccttattcagcgtctcactatcgccgagatactcaagcaaccaggttaacgcagggctcatatcattttgctgccatgtcagacaacatgcgctatccggaaaggggttttccagttctaatgctacccacttcccctcattaagccacggtttggcgaaatgtgttggcaccatccctatgcataatcctgcgctgatacaggttgcgctactttcccagtcaggcacgacaactcttttttggttatccagcaaccaggtaatacgtttaggtagcgttcggctggtgtcttcgcgcaccaagctcggccagttgcgcaacgtatcatcgctgaacgggccatccatcaacgccagcgggtggtgactggcaacaacgcaactccagcttagcatccccatatcccggaaggcataacgaccgcctaccggaatcgcgcgtgttgcgccaatcgccagttccacgcgcccgtcggaaagcgcatcccagacaccgttgaacacttcctgaaagacaagaagttcgacatcatcaaaatggcgataaaaatcaacgatcatctgccgtgtacgttctggcctgacaatattatccactgcgatagctaactgaccgcgccagccgttcgctatctgctgacattgctggcgggtgatctgcatttttttgacaacagagcgcccttctttgagaaaccacgctccagcagcggtcagctccacatcacggtgccgtcgttcaaagagcggcaccgccagccactcttccagctgacgcacggtatagctgaccgcagaaggaacgcgatgcagctcctgtgccgcagcgctaaaactaccattacgcgctaccgcatcaacaacttcgagactatattcactccacatagtctgcctgcaaaatttttgaaaccagtcatcaaatattaccgtttcacaacactaatttcactccctacactttgcggcggtgtttaattgagagatttagagaatatacatgcaacctgggaaaagatttttagtctggctggcgggtttgagcgtactcggttttctggcaaccgatatgtatctgcctgctttcgccgccatacaggccgacctgcaaacgcctgcgtctgctgtcagtgccagccttagtctgttccttgccggttttgccgcagcccagcttctgtgggggccgctctccgaccgttatggtcgtaaaccggtattattaatcggcctgacaatttttgcgttaggtagtctggggatgctgtgggtagaaaacgccgctacgctgctggtattgcgttttgtacaggctgtgggtgtctgcgccgcggcggttatctggcaagcattagtgacagattattatcctagtcagaaagttaaccgtatttttgcggccatcatgccgctggtgggtctatctccggcactggctcctctgttaggaagctggctgctggtccatttttcctggcaggcgattttcgccaccctgtttgccattaccgtggtgctgattctgcctattttctggctcaaacccacgacgaaggcccgtaacaatagtcaggatggtctgacctttaccgacctgctacgttctaaaacctatcgcggcaacgtgctgatatacgcagcctgtagtgccagtttttttgcatggctgaccggtagtccgttcatccttagtgaaatgggctacagcccggcagttattggtttaagttatgtcccgcaaactatcgcgtttctgattggtggttatggctgtcgcgccgcgctgcagaaatggcaaggcaagcagttattaccgtggttgctggtgctgtttgctgtcagcgtcattgcgacctgggctgcgggcttcattagccatgtgagcctggtcgaaatcctgatcccattctgtgtgatggcgattgccaatggcgcgatctaccctattgttgtcgcccaggcgctgcgtcccttcccacacgcaactggtcgcgccgcagcgttgcagaacactcttcaactgggtctgtgcttcctcgcaagtctggtagtttcctggctgatcagtatcagcacgccattgctcaccaccaccagcgtgatgttaagtacagtagtgctggtcgcgctgggttacatgatgcaacgttgtgaagaagttggctgccagaatcatggcaatgccgaagtcgctcatagcgaaagtcactgatctatatcgatatacttatacttaggctgctaacaaaattttgttgtatgattgaaattagcggcctatactaatttcgagttgttaaagctacgataaatattatgtttttacggggacaggatcgttcccgactcactatggatagtcatttcggcaagggttcctcctttccctctgttctacgtcggattatagactcgcggttttttctgcgagatttctcacaaagcccaaaaagcgtctacgctgttttaaggttctgatcaccgaccagtgatggagaaactatgagtagtagctgtatagaagaagtcagtgtaccggatgacaactggtaccgtatcgccaacgaattacttagccgtgccggtatagccattaacggttctgccccggcggatattcgtgtgaaaaaccccgatttttttaaacgcgttctgcaagaaggctctttggggttaggcgaaagttatatggatggctggtgggaatgtgaccgactggatatgttttttagcaaagtcttacgcgcaggtctcgagaaccaactcccccatcatttcaaagacacgctgcgtattgccggcgctcgtctcttcaatctgcagagtaaaaaacgtgcctggatagtcggcaaagagcattacgatttgggtaatgacttgttcagccgcatgcttgatcccttcatgcaatattcctgcgcttactggaaagatgccgataatctggaatctgcccagcaggcgaagctcaaaatgatttgtgaaaaattgcagttaaaaccagggatgcgcgtactggatattggctgcggctggggcggactggcacactacatggcatctaattatgacgtaagcgtggtgggcgtcaccatttctgccgaacagcaaaaaatggctcaggaacgctgtgaaggcctggatgtcaccattttgctgcaagattatcgtgacctgaacgaccagtttgatcgtattgtttctgtggggatgttcgagcacgtcggaccgaaaaattacgatacctattttgcggtggtggatcgtaatttgaaaccggaaggcatattcctgctccatactatcggtagcaaaaaaaccgatctgaatgttgatccctggattaataaatatatttttccgaacggttgcctgccctctgtacgccagattgctcagtccagcgaaccccactttgtgatggaagactggcataacttcggtgctgattacgatactacgttgatggcgtggtatgaacgattcctcgccgcatggccagaaattgcggataactatagtgaacgctttaaacgaatgtttacctattatctgaatgcctgtgcaggtgctttccgcgcccgtgatattcagctctggcaggtcgtgttcagtcgcggtgttgaaaacggccttcgagtggctcgctaaaggctattctatcgccccctctccgggggcgatttcagatcaggcttctgtgcctggttgattcatggcattttctcgtgccgccagcacacgttctaccgtatctaccactgcctgagtttgtggatcgatttcaatgttgacgcgtgcgccaagttttttcttcccaagagtcgtgcgttccagtgtttcccgaattaaatggacgcaaaaacgcgttggcgtgacttcgccgacggtcaggctaataccgtcgatgccaataaatcctttgtacagaatatatttcatcaactgactatcctggactttaaaccagatctggcgattattttcactggttaatattttcgccacttcagcagtggtcataatatgaccactcattaagtgtccgccaatttcatcactgaatttcgccgcacgctcaacgtttacccaatcccccacttttaaatcgccaagattggtaatgcgtaacgtttctttcatcaggtcaaaactgacatggttgccgttaatttccgtcacggtcaggcagcaaccgttatgcgccacggaagcaccggtttccaggccgtccagcatgtggtcgggtaactccaccacatgcgtacgaaaatttggtttctcgtcaatgctcaccagttttgcggtgccctgtacaatccccgtaaacatacttacaactcctgaaatcagttaagacattctgttcagcacaatagcaggtggaaaacgcccttaccagtgaaggggtaagaatggctattttttcactggagaattaataaatcctcgctacaatagactgaatttcccctgcttcttctttttgctgcccattcaggcggctttttagtctctcatataactacaaataaaaggtgttcacgtgcagaagtatatcagtgaagcgcgtctgttattagcattagcaatcccggtgattctcgcgcaaatcgcccaaactgcgatgggttttgtcgataccgtgatggcgggcggctatagtgccaccgacatggcggcggtcgctatcggtacttctatctggcttccggcgatcctctttggtcacggactgctgctggcattaacgccggttatcgcgcaattaaatggttccggtcgacgtgagcgcattgcgcatcaggtgcgacaaggtttctggctggcaggttttgtttccgttctcattatgctggtgctgtggaatgcaggttacattatccgctccatggaaaacatcgatccggctctggcggacaaagccgtgggttatctgcgtgcgttgttgtggggcgcgccgggatatctgttcttccaggttgcccgtaaccagtgtgaaggtctggcaaaaaccaagccgggtatggtaatgggctttatcggcctgctggtgaacatcccggtgaactatatctttatttatggtcatttcggtatgcctgagctcggtggcgttggttgtggcgtggctactgcggcggtgtattgggtcatgttccttgccatggtttcttacattaaacgcgcccgctccatgcgtgatattcgtaacgaaaaaggcaccgcaaaacccgatcctgcggttatgaaacgactgattcaactcggtttgccgattgcgctggcactgttctttgaagtgacactgtttgccgtcgtggctctgttagtgtctccgctcggtattgttgatgtcgcaggacaccagattgccctgaactttagtagtctaatgttcgtgcttccaatgagcctggcggcagcggtaactatccgcgtaggttatcgtctgggtcagggcagtacgctggatgcgcaaaccgctgcgcggaccgggcttatggtgggtgtctgtatggcaaccctgacggccattttcacggttagtctgcgggagcaaatcgccctgttgtacaacgacaatcccgaggttgtaacgctggctgcgcatttgatgttgctggcggcggtatatcagatttctgacagtatccaggtgattggcagtgggattttgcgtggttataaagatacgcgttccattttctatattacctttacggcttactgggtgctgggcttgccaagcggctatattctggcactgaccgatctggtcgttgaacctatggggccagcaggcttctggataggctttattattggcctgacgagcgcagccattatgatgatgttgcgtatgcggttcctgcaacgtctgccgagtgccatcattctgcaacgagcatcccgctaataaagacaaggcgcaaccttcacgggttgcgcctgtatttttacgcaggctggagcgttgcgccaatcccgtcttcgtctggctgtaatttcagagcgttacacagagtttgccgactggcatctgttatctcaacgtgtatatccccggtaacttcccctttcacattgatgaagtcaggactaatttcttttgcactggtttgcaggcaaatcgctccctctccgcgcaggcgtttcactttcagttgcacatgcgttgccgcatcagtgatcagccacagttttccaccattcagattgatgttaccaacaatgaaagtgacactgtcaccttttaccgtactgccgtctagaatcaacacaccgccctgctgtacagtaatcgtactttgttgcagctctgcgccataaccaataatcatactagcgccgtccagtaatgcaacactcccggtcagttcaaccggtgcgcgatcttcctctacgacaaaattttcgtccgcgctggtgggactcaacaggatcactgtcccaccttgtattaccgcgttttccagcgtaccggcatgcacttcagcccgaccacccacattcacggacaggttttgcgtcttaccggaactgtagagctgaaggccatccgtccccagacgataaatggatccattctcaacaatagtgtcagagtcttcaccaccgagattattcatggtgccaccagcaagcaacgtatcactggctttcccggccagcataaaaacgccgccctgattaatctcacaattgctggcttccccacctggatacaccaacaattcaccaccttcatctaccacgaccgcactggttgtcccattaaccaacaggccgccctcttgatcgagaatgattttttccgcgcgatgtccttccagtacacgcaggttaccgccattttccagcaacaaaccgcaggcataacctttatcaacgctgaattcaccttcgggatggcggccattaaccgtagcgagcgtagagagactaattgcgcctccctcggactgaacaatatctgtggcaatggcaccatcgctgacgcttagcgtgccattgttaccgtactgtgtgcatttggcgatcccaccggttgccactttcaaccagccagcccccgtgaccacggtattttcggctcttccgccagcttcaacaatcaactcgccttcagtaagttgcgtcgcgccaatgacctcgccggtcttaacaatttgcacgttcccgtcgctcatcaagtttttcgcatcagatcccatgatttattcctttgctgcatctgtgtgcctttattgctacctaagtgtaaaggctacggaggatttatccacgacagatttgagatggtggcaaacaactctgtttaaactctgatacacgaattattgggttgtatcagatgtaaatgcgatcctgaataaaaatcacccttgcaaatcaacaaaatatagccaatttgcttaaaagctctgcaaacggtcgaaatagcgcagaaaattacgttttgcctcttgccaccttcccactctgccgctaatattcgtccccgttgtcacctacaacgttgcgttcatagctcagttggttagagcaccaccttgacatggtgggggtcgttggttcgagtccaattgaacgcaccatcctgcgtccgtagctcagttggttagagcaccaccttgacatggtgggggtcggtggttcgagtccactcggacgcaccagattttcttaatctggtcttctcctttttccctctgtttcttctctgtatccaatacgttaaaagatttacactgtcttcgtatgcgttatcagaaggagaatcgctatggcaactttgttacaacttcattttgcttttaatggcccatttggcgacgcaatggctgagcagcttaaaccacttgctgagagcattaatcaggaacctggttttctgtggaaggtatggacagaaagtgaaaagaaccacgaagccggtgggatctaccttttcactgatgaaaaaagcgcccttgcctatctggaaaaacatactgcccgactgaaaaatctcggcgttgaggaagttgtcgccaaagttttcgatgtcaatgagccacttagtcaaatcaatcaggcaaaactcgcctgacagaatttaatcaagggcggttagcgcccttttcatccctgtctgaaatttctcaaattctaaaaatctcaaccaaacttatctgataacactaaattcgaaagaatgcgtacaggtaagtaacaatgaaaaaaattgctattgtgggtgccgggcctacggggatctacaccttattcagccttctacagcaacaaactccactttctatttctatcttcgagcaggctgacgaggccggtgtcgggatgccatacagtgatgaggaaaacagtaaaatgatgctggcaaatattgccagtattgaaataccgccgatttattgtacgtatctcgaatggctacaaaagcaagaagacagccatctccagcgttatggcgttaaaaaagaaaccttgcacgatcgtcagtttttaccgcgaattctgctgggcgaatatttccgcgatcaatttttacgactagtagaccaggcacgacagcaaaaatttgcagtggctgtttatgaaagttgccaggttaccgatctgcaaattacaaatgctggcgtcatgctcgctacaaatcaggatttacccagcgagacgtttgatttagcggtgatcgccacgggtcacgtctggcctgatgaagaagaagcaacccgaacgtattttcccagcccgtggagtggcctgatggaagcaaaggtcgatgcgtgtaacgtgggtattatgggaacatccttgagcggactggatgcggcaatggcagtggctattcagcatggtagcttcattgaagatgataaacaacacgtcgtttttcaccgcgataacgcaagtgaaaagctaaatatcacgttgttgagccgcacgggtattttacccgaagccgatttctattgccctattccctacgagcccttacacatcgtcaccgatcaggcattaaatgctgagattcaaaaaggcgaagagggccttttggatcgggtatttagattgatagtagaggaaatcaagtttgctgatccagactggagtcaacgcatagccttagagagcctgaatgtcgattcctttgctcaagcctggtttgccgagcgcaaacaacgcgacccatttgactgggcagaaaaaaatctccaggaagtcgaacgcaataaacgagaaaaacatactgttccctggcgttatgtcattctgcgcctgcatgaagccgtacaggaaattgttccacatctgaatgaacacgaccataaacggttcagtaaaggccttgcccgggttttcatcgataattatgcggcaatccctagtgagtctattcgtcgcctacttgccttacgtgaagcgggaatcattcatattctcgccctcggtgaagactacaaaatggaaattaatgagagccgcaccgtcctgaaaacggaagacaacagctacagctttgacgtttttattgatgcccgcggacaacgtccgcttaaagtgaaagatatccctttccctgggctacgcgagcaattacagaaaacaggggatgaaatccctgatgttggcgaagattatacgttacagcaacccgaagatattcgtgggcgcgtagcgttcggcgcgttgccctggttgatgcacgaccagcctttcgttcagggacttacggcatgtgcagaaattggtgaggcgatggctcgggcggtcgtaaagcctgcatcccgtgctcgtcggcgtcttagctttgattaaaggtaaagctatcagcactcaacaaactgatgctgttcattaagacgatagcggactccggctcgaatattgttttcaccttcaatggcgacggcgaagcgaactctttcgccgtcatgatatgccagtgcggcgcttcctcctggcccgagaataatactgtcgaccacgcccgtgctcactaccgtactattttcaccgctggcaatgatgtgtacattgtcgccgctgttggcaattctggcgtttgcgccaaagctggcgatttgcaccaggtcaccattactggcgacatgacaccgttcacccaatgtacaaacgcgtactcgcattccggtattcgcaatccgactgctatctccagcgctgcttatccggctagaattaccggttacagcaacccgtgcgcgttcaccggagctgccaatgtgactgttaaagccgacacttccaatccgcacgctataacccatactggcaatttgcgcggcatacccagcggttgcgattctggcgttatcctcacaacagccgatgcgagcatgatcgtcgctgcgggcaaactgactgcaaaatggtctctctccggggtctgtggccagtttttgcatagaggaaacttcctgatgcgcgaagttttcatccgccagccattttttccacgcatactcaaccagactctccgcccagtccgtatatccttcctcaatcagtgcatgatgaatatcggcataactaccgccgcgtgggaaatggcgcaggaaccagcgatacatcaccgctccgatacgccattctcgcaggtctgcttgtgtaatgatcattcgttagtgccggtgatagccatcgaccatgcttttaaaggtttcgtgtggcgtacgccccgtggtgcaaagataaagatgaccgaagataaaaaagaggcttataaatgccagagcaaaatgtgtctgcaataaccagtatcttacgccaggaaacacatctcccacggcttgcggatagagacacagcagccccgtcaatagtaacaacggcagcaatccatacatgacaccaacataggcgacctgctgtaagggattaaatttagactgggttgttgccgggaaaggatgttcttccccctgcataatgccaaacaaataaaatcgcgtttgttttgccgctcgttccagccacccctgacgacgaatgcgatagtggtgaccattatccccaacggcattgatcagcacaaagccgagccagcatgccagtaacaaaaatccgcaaacttcatgcaccgcaaccagacttttaaccgcagttgcgcccaccatcgcaaagtgatttatcagcccactggccagcaacaatacaaagagtaacgcattgctccagtgccataatctgaccgctttgctgtaaagataaatcttctcaccatgatcggtggcacttttcttcacgccacgagcacgaagcaaggcatgcagccccagcaccaaccacatcccaaccagcaatactccggcaatgatcaaccacaccggccaaaattcgggagtgaactgtggcacatagttcgctaactggctctgaaactgttcagcatgttggctcgggttcatacattttcctttttaatcaaatgttgaccgaaccggcgatacagatgcggtttcccggcaccaggtagctgatattgatagtatttattttgctgcaaccacgcctgaatttctgggctatcttcgcgaccaaagatcaatgcgtgttccgggcaggcgctgacgcaaatgggcggaaagccttttgccagtcgggactcagcgcagaaatcacatttatctgccactttagtgacagggttaaggtagcgaacctggtacggacaagcgccaatgcaataactgcagccgatgcactggcttttttctacccgcacgatcccctgctcatcacgccagctcgcccccgtcgggcaaacgtcgatgcacggagcatcttcgcagtgctgacaactctggcgaaaaaagtgatactgcgtttcgttgtcgttatcggtgactggaatgtgtgctatgcttaaacggcttccctgagcggggacgtggttagttttacggcatgcgcgggcgcaaatattacagccattgcaccgactctcgtcatgaatcatggcataccgaacttccttttcttgcctcgtgttcgctaacagagaagacgcagaaccagtaaaaaagattactgttcccatccccagaacaaatttgcgtcgagtgaaggacatctgattatcccctaatgcagtggctgcaactgtccaccctatccatgacatctccctgaaatttcaggggttctgaaactgctctacctcgaaccattcgcataagccataagccttgccataggtcataaatcgctcgctaaacaagtacaacaccgccgtgctactctccacctgccgtatatcggcatattcaggtgcaacatccatcgcggcgatcgcggcttcaatctgcgcttcctggaagtaatatggcgcttgcatcagcatggcgactttgtaaggacgaggatacgtctggcactcaaaacgaacggcgtgtgcaatggcgcgacaaatgtcctgctccacaacttgcaaagacatcgccgcgtagttttcactcatggcctgcgtactgtaatagtaatcatccttgcttcccgtcaaacaagcgatatccgcgtagtctccgttctgcttaatgctttccagcaaaacactcagttcctcttctgcaaccaaatagggtgggctgagaaacacggcgcgcgccaccagctgcccagccgcagaatgctggcgaatgaactcagccaggatttcagcaggttctggttcggttaccgtatcaacggggtgacgcatcccctgcaaccattgccgcttcgcctcgtcaacttcgctgactttcgctaacggcaattcatcctgatggttcatcttacccattccttacgcaggcagtagattgtgtgctgccagatcggcggcaatatcttccagccccagacgctgcaatgtttcgcgggttggacaaccaagctgtgggtcccagcccatttctttgtagaacatcgtgaggctagcatgcatatcgtcacgatccattttgtcagtaccttcagtaaagaccgggatctgcggatccttgtcgaatacccaggaacagataagatcgtgttcattacgcatatctttggtttgcatcagttttaccgtgtaggcacgatgcaacgtaaaaatacgctctgcagctaaatctaatttttcctgagtcatctcttcgccggtgatcgctttgaagaatttggcttcaagcgccagatcgccccggtaattacggcttttcagcgggctaacggtcattggccagacccagttgcacagggtgacggcgttatgcaaacagacccgcaacaggctccactttgcatatttaatttttgcgtcattgattggcgtgtagtttttggtttcatcgtaagcatcttcagaaccaaaaagttctttcgccacttcacgttgcagtttcaatggcaagccggaaccaataaagttgatatgggtatgcgtcatgcagtcacggttgaacatacagttaacaatggaaccgacctgcgcactcgcttcattggcatggtgaaccggatagccaaacgggctccagagtttatttttcgcgtagccccagtactcttcacccaaattccagcgttctgcgatggcataactaccatcagccaggtgactcagctcacccacacgatgcgccagacggtagtaaaaatctttaatgaagttaacgtcacccgcttccagttgatcccagcgaatttctgcatactcttcagctggcagaacacgcttgaacacacctttgctgtaacaataagtaaagtcgcgatgcaactgcccgtagttacaccataggccgtagtcatcgaacaaattcagacccaccaggttaccaatcacacgaccatcgtctttatcttcaaaatctttcggcccgttcgggaagatggtggtatggacaaagtttgctacacaagtgttaccacctgtgctgggcacgccaaactctttcacccgaggaatattcatttgggtcatacaacggatcgggcaagagtggcagccgctcatttttactgtgtatttctctgccgccggtcctaagtcaaaaacggatttataggtacgaaagccgaccgtattctgattgcctggcggaatttcacccgtttcaatcggaccaccttcagccgcgccccaaaacagccctttacgtgctgtccagcgactcttgggatcactatactctgcccagctttgtggcgtacttggcacgacatggttgttattcgcaccaataagttcagtcatcatgtaatcattgagacgcttcatctcctgacgatcggcaatgttgacccctttcgtcccttcaaccgcaatcgctttcaggtttttgctacccattattgcgccagttcccgcaccgccgctgtggttacggctattcaacatgccagagagaggaacaaggttttccccagcctgaccaatagccgccacacaggtttccggactggtcaatcgacaaatttcttccgtcgttgcgcgcgtcccttttccccataagaaatcggctttttccaggctaactttgtcatctttaatcttcagccataccggacttttcgccttcccttcgataataatgacgtcgtatccagcgaatttcatttgcgctgcaaaaaagccacccatatgggcatcgacgactaaatttcctttggtaaaagtagaaagactggtgatatttacgcgagaactacagggggcaccagatccagttaatgggccggtagcaaagactaatttattcgcttcatcgaaaggtttcgtgcctggcggtacttcgtcatacataattttgtagccgaagcccatgccaccgacaaaacttttaaacttactggaatcttcgagggtaatatttcctgtcgtgagattgactcttaatatattacctgtccaaccgttagccatgattttttcctttgcaagattcacacagtaatatctttccactcgataatttttaacgcccctgttgggcaggcgtttgcgcattcaccgcataacacacatttgctggattttttactttcggtatttacggtggccatcatccacgggcatgccgtagtacaggcgctacagccaatacagcgtttatgatcgacggtaatacagccttctttctgctgccaggtaatcgcaccaatcgggcagacgttcatgcattgcggctctttgcattgacggcaggtgtccgcggtatagttgagatcgccatacaggccgccgccagagccaaccccgttgtcgccaaagaaataattgcgatggattttgatacgggagaagaatgtccctacactgccatcgttgaagttggtacaagagatttcacagcggtggcaacccgtgcatcgcgctcgctgggtcaccagcacccctttgggggtatttatcaaccctactgtgccgctatcaatatcttcctgtttgcaacccaaaagactcagtaacgcaggggcaattgttagaccagcaaggccttttccacttatacgcaagaattctaatcgcgttaagccaatatctaatagtggacgatcaaccgggttcatttatttcgcatcctcttcgcaaacacagtgctgacaattcagcagcctgatattaagcattcaactaatacgctgctgactctgtccccaacaccagatattttccctaacccgatagtgtatgagaaaagattaacgccgataaactaatcctttatggttaggagaaaaaataatgtgattattctgagcccttaacattgatcgttatcaattaaaattacaaagcaagaaattataagtgaactgatatttattatcatttgaaataaatttaacttaagcgacaattatttgtgactttcattgcagaaaataaaaataacattatcgctataaattaaaatacataccgaaattcgtataatttcagcagttgttatttagaatgattaactggaccgcaactgaagcaagaatatcaggatgaagcttaccgcctcatcctgaatggtcattttaccagtgcgttaatgacggtttccatcgcctgcttttccagctcactgcgctgaatgcgtttattggctaatgctgtacgtaatacgcctgcgataacaatatgctttggttcctgccccagatcgcgcatttccagcacaactttaccgacaactctgcacatttctcggtacagttcatcctcttttgtccgatttcccattctttatacctatttatcatgccaactatcagcatatatcaatctaaccaattaaacaaaaatcaaacaaaatcagacaaataacgcgataaattattttaactgtagcaattgagcgatgatatatttatacaccggatgaactttcacttatcctcacactgacaacttcggcaccagacgttgcgcaaacagtgaagtttttgcgtaaccttttccctggaacgttaaatctttgataacaatttattgtctaacaagttgtatattttttgaaacgctgtttttgttttccttttggattaatttcagcgtataatgcgcgccaattgactcttgaatggtttcagcactttggactgtagaactcaacgactcaaaaacaggcactcacgttgggctgagacacaagcacacattcctctgcacgctttttcgatgtcacctatccttagagcgaggcaccaccactttcgtaataccggattcgctttccggcagtgcgcccagaaagcaagtttctcccatccttctcaacttaaagactaagactgtcatgaaaaagaccaaaattgtttgcaccatcggaccgaaaaccgaatctgaagagatgttagctaaaatgctggacgctggcatgaacgttatgcgtctgaacttctctcatggtgactatgcagaacacggtcagcgcattcagaatctgcgcaacgtgatgagcaaaactggtaaaaccgccgctatcctgcttgataccaaaggtccggaaatccgcaccatgaaactggaaggcggtaacgacgtttctctgaaagctggtcagacctttactttcaccactgataaatctgttatcggcaacagcgaaatggttgcggtaacgtatgaaggtttcactactgacctgtctgttggcaacaccgtactggttgacgatggtctgatcggtatggaagttaccgccattgaaggtaacaaagttatctgtaaagtgctgaacaacggtgacctgggcgaaaacaaaggtgtgaacctgcctggcgtttccattgctctgccagcactggctgaaaaagacaaacaggacctgatctttggttgcgaacaaggcgtagactttgttgctgcttcctttattcgtaagcgttctgacgttatcgaaatccgtgagcacctgaaagcgcacggcggcgaaaacatccacatcatctccaaaatcgaaaaccaggaaggcctcaacaacttcgacgaaatcctcgaagcctctgacggcatcatggttgcgcgtggcgacctgggtgtagaaatcccggtagaagaagttatcttcgcccagaagatgatgatcgaaaaatgtatccgtgcacgtaaagtcgttatcactgcgacccagatgctggattccatgatcaaaaacccacgcccgactcgcgcagaagccggtgacgttgcaaacgccatcctcgacggtactgacgcagtgatgctgtctggtgaatccgcaaaaggtaaatacccgctggaagcggtttctatcatggcgaccatctgcgaacgtaccgaccgcgtgatgaacagccgtctcgagttcaacaatgacaaccgtaaactgcgcattaccgaagcggtatgccgtggtgccgttgaaactgctgaaaaactggatgctccgctgatcgtggttgctactcagggcggtaaatctgctcgcgcagtacgtaaatacttcccggatgccaccatcctggcactgaccaccaacgaaaaaacggctcatcagttggtactgagcaaaggcgttgtgccgcagcttgttaaagagatcacttctactgatgatttctaccgtctgggtaaagaactggctctgcagagcggtctggcacacaaaggtgacgttgtagttatggtttctggtgcactggtaccgagcggcactactaacaccgcatctgttcacgtcctgtaatattgcttttgtgaattaatttgtatatcgaagcgccctgatgggcgctttttttatttaatcgataaccagaagcaataaaaaatcaaatcggatttcactatataatctcactttatctaagatgaatccgatggaagcatcctgttttctctcaatttttttatctaaaacccagcgttcgatgcttctttgagcgaacgatcaaaaataagtgccttcccatcaaaaaaatattctcaacataaaaaactttgtgtaatacttgtaacgctacatggagattaactcaatctagagggtattaataatgaaagctactaaactggtactgggcgcggtaatcctgggttctactctgctggcaggttgctccagcaacgctaaaatcgatcagctgtcttctgacgttcagactctgaacgctaaagttgaccagctgagcaacgacgtgaacgcaatgcgttccgacgttcaggctgctaaagatgacgcagctcgtgctaaccagcgtctggacaacatggctactaaataccgcaagtaatagtacctgtgaagtgaaaaatggcgcacattgtgcgccattttttttgtctgccgtttaccgttactgcgtcacgcgtaacatattcccttgctctggttcaccattctgcgcactctctacactaggcgcattgctggctgcgggagttgctccactgctcacgctaaccggataccctgcccgacgatacaacgctttatcgactaacttctgatctacagccttattgtctttaaattgcgtaaagcctgctggcagtgtgtatggcattgtctgaacgttctgctgttcttctgcgcttagtggtcgatgtacttcaacataacgcatcccgttaggctccacggaatatttcaccggttcgttgatcactttcaccggcgttcccgtccgcacgctggagaacaaggctttaatatccggtgcattcatgcgaatacacccactactgacgcgcaaaccgacgctgtccggcgcactggtaccatgaatgaggtattcgccattaccatgcgcgaggcgcagtgcgtaacgtcctagcgggttatttggtccggcaggaacgactggcggtaatttaatgccacgctccaggctacgctgacgaatgcctgccgtaggcgtccaggttgggttagggattttctgcccaacacgcgtttccatcaccggcgtttccagcccctgcaatccaatacctattggataaacctgcacaatattttctcccggcggataataataaaggcgcagctctgcaaggttaacgataatcccctgacgcggtgcatcaggtaataacagttgactaggaatagttatcgtcgtaccaggttttggcaccggggcgatagtgttattggcttcaaggatcaacattgccgcagtatcaaaacgtcgggcaatagcctgaaggtttttatccccttcttgcaccgtatacgtttgattttgcccaaccagtcggcttccggttggtggtagcggataatcaaccgcccaggcagcctggatggcgctaaaagcgccgataagcgtgagtgtaagcaaagacgcgcgtttcattgtaaacctcctgtatttgccggagactcacgctgaaacgtcggatggcgcttatgttcacctgaaaccaaaacactcctgtgcaggtcagtgtaaacattgaccatccggcaatgtgagccaaccggatgaaagctgtccttttagtttagctaagtgcagcggctttggcgcgaattgcgcgaatcatcgcttccagaccttgactacgagatggggtgagatgttgggtgagcgccattttttcaaaccacggacgcacatcgaaattgacaatatcctgcggcgtcatctgatcgtagagaataaagacgaccgcaataagccctttcacaatcgccgcatcgctgtcgccctgtaattcaataattccctgggcattctggcgcatgacaatccacacctgactctgacagccctgaatgctattttgtggacttctgtcttcgtcgcgtaattctggcagacgctggcccagctcaataatgtagagatatttctcttcccagttggcgcagcgtaaaaaattacgcagcaacttttctttatccggcaataaagccatagtgcctccctgttatcccagcaaacggtgaatacgttgcaggccggtcaccagacgatccacttcttcatgggtgttatacatggccaggctcgcccgacacatcgcagggacgttgtaataggccatcaatggcattgcgcagtgatgtccggtacgcacagcaatgccgtaattatcgagaaaactgccaacatcataggcgtggtgtttaccgagattaaaagcaataacgccaagcctgttttgtgggccatagagagtgagatccggtacagattccagctgacttagcgcataatgcatcagattctgttcatactcggctatgttattaagccccagcgcgctaacatactccagcgccgcgccaagaccaatgatgcccccggtattgggtgtaccggcttcaaaccgccatggtgctttggtccaggtagtgccttcactcaggctgacggtggcgatcatagaaccgcccccttcccacggcggcatctcctgcaacaaggcttctttcacataaagaatgccaattccggtggggccatacagtttatgcccggagaacacgtaaaagtcgcaatccagcgcctgaacatccaccggatgatgcatcaccgcctgagcgccatccaccagcacttttgcgccatgctggtgcgcaagcgtgatcatttccgccagtggattttctgtgccaagcacgttggagacatgagtaattgccagcaggcgagttttctcatcaaacagcgtaggcagcgtctccagttgcaacgtaccatcgggattgagcgggatcacacgcagctctgcgccaacgcgtgcgcaaagcatctgccagggaacaatgttagcgtggtgctccatctgactgatgatgatgttatcgcccgcccgcacgttgctgttgccccagctattggcgaccagattgatcccttccgtcgtgccgcggacgaacaccagctcttccgcgctacgggcattaataaacaggcttgcccgcttgcgcacgttctccattttctcggtcgcctgggcgcttaaggtatgaataccacgatgcaccgccgcgtagccatgacgataaaactcggcctcggcgtcaatcacctggctcggtttctgcgcactggcggcgctgtcgagataagccagcggcaaaccgtttacctcacggctaagcaccggaaagtcggcccgcactttgtcgacggaaaaaatcatcttgcacctcctggcagccgttgaccgattcgggccagcacctgctgtttaagcccctcatcacgcagtgcttccgtcagttcggcagcgaaggcgtaaatgatcatctgctgggcatcctgctgattgatcccgcggctgcgcagatagaatatctgttcatcatcaatacgccccaccgtcgcgccgtggctgcatttcacatcatctgcatagatttccagctgcggtttcgtatccacttccgccagtttgcccatcagcagattgttgttggtcatctgaccatccgttttgatggcgtgctgcgcgacgttgatcaaaccgttaaataccgcgcggcctttgtcgctgacgatagttttgtgcaactgtcggctgttacaaaaacctttattgtgttccagccaggtacgggtatcacacacctcgtttttcaccggcatcgccaggctattgatccgcagcgtgctgttttcgccattgagttgcgtactggtgttgtgtcgtaacactgcgccacccagcaggaaactgtggctaaatgcggtggcatcctcagccagcaacaaatcgttatgagcaaagtggtgactgagcgggttttcaaacgccagcttgatatgctgcaagtgggcattcgctgcgacgttgatagtgaaccgtgccccggtaaaatgacgagcatcattcaggctgacaaaatgttcgatcaccgttgcttcggcaccttccgccagatccagatgatgtcggtaatgggcagtgttcacctcttcacctgccacgccctgggtgatatgcattaacagcaatggctttgccggccgttgaccgcgcttcacggcgatatgcgtcacgctttgtgccaggctttccgtcaaatgcagaaacacttccgcctgaatagcgtcgggtaaaccctgacggtcgtcgttaatgctcacttcatatccgctgccttcagttgcatcgctcagtgcgggcacgtaacgcccatcgacaaacaccagccgcacggagtctaacgttaacgctaaggcattacgctgctgtggggatatctctcccgcaatgctgacaaactggctattgatcagcccttccagcggcgtatatttccagttttcatgtttacgtgtcggcagtccggtacgcagcaattgttgtaaatgctgctgtgcttgcggggagcgttttgtcccttcagcttcaaacaagtgatgccactgttgcagcgcgttactgctgttcggtaagccagccataaccctgctcctccagttgtttgaccaacgtgaaatcgccggatttcacaattcgtccctgatatagcacatgaacgtaatcaggcttgatgtagtcgagaatgcgttggtagtgcgtaacaatgatgaaactgcgcttgccatcacgcaggctgttcacgccatcggcgaccacttttaatgcgtcaatatccagcccggagtcgctctcatcaagaatgcataactccggttccagcaccgccatttgcaaaatatcgttgcgctttttctcgccgccggaaaaaccaacgtttacgctacgggttaataaatcttccggcatcttcaggagagcgattttctcttccatcaaatcctgaaaatcaaagcggtcgagcgtttcctggccgcgatagctgcgcaccgcattaagtgccgtttgcaggaaaaactggttactgacacctggaatctccaccggatactggaaggccataaagatgccttcgcccgcgcgatcttccgggctcagcgcaagcaaatctttgcctttgaactcaaccgtgccgcccgtcacttcataatcttctcgcccggcaagcgttgcgcttaaggtacttttgccgctaccgtttggccccataatggcgtgaacttcgccgggatgaacgtcgaggcttaatccgcgcaggatagctttatcttccacgctgacgtgtaaatctttaatacttaacatgtttattccttatccgacgctgtgttcaagactgatggcgaggagtttttgtgcttcaacggcaaattccaacggcagctcgctgaacacgtctttgcagaaaccgttaacaatcatgctgatggcgtcttcttcgctgatcccgcgttgcaggcagtaaaacagttgatcttcaccaatacgacttgtcgttgcctcgtgttccagttgcgcactattgttacgacactcaacatacgggaaggtatgcgccccacaattagcgccaatcagcatactgtcgcactgagtgaaattgcgcgcattggttgccgtcggcatgattttcactaagccgcgataactgttctgactatgtccggcagagatccctttgctgataatggtgcttttggtgtttttaccgatgtggatcatcttggtgccggtatccgcttgctgatgaccgctggtcagcgccacactgtaaaactcaccaatggagttatcgccgcgcaaaatgcagctgggatatttccacgtaatcgcactcccggtttcactttgcgtccaactcattttgctgttttcgccttcgcacaaagcacgcttggtgacgaagttgagaataccgccggtgttgttatcgccaggaaaccagttttgtaccgtggaatatttcacctcggcgtttttatggatgatgacttccaccactgccgcgtgtaactgatagctgtcacgcaccggagcggaacagccttcaatgtagctgacgtagctgtcttcgtcggccaccagaatggtgcgctcaaactgcccggttttttctgcgttaatgcgaaaataggtggaaagttccatcgggcagcgcacgcctttaggcacataaataaacgtaccatcagaggctaccgccgcattaagcgcggcaaagaagttgtcattccccggcaccacggtgccgagatatttacgcaccagttccgggtgatcgtggatcgcctcaccaaaggaacagaaaataattccctgctccgccagtttttcgcgataagtagtggcaacgctaacactgtcgaaaatggcatccaccgccacctctttgccttcccgcacgggaacgcccaactgctcaaacgccgcctccacctctttacttaaaaaggcgttcgcgccagtttgctgcaccgcgccaggttcagacgcgcaagtgtcgtcacaattaccgcagcttggtgcactgtagtagctgtaatcctgataattcagcttgtcgtagtgcgctttcaaccagtgcggttcttccatctccagccatgcgcgataggcgtttagacgaaactccagcatccactccggctcattacgcttcgcgctaattgcgcgcaccacctcttcgtttatcccctttgccagctcatcggtggctaactgggtgaagaatccttctttataattcagcgggccgccggtccaggttttgacatcgtcagttgcttcagtattacgagacatagtaccgcttataccccaaagctttcgccacagccacattcattctgggctttagggttgtgaaatttgaatatctgattaagtccttcacgaacgaaatcgacttccgtgccatcaataaacggcatcgcttgcagcgggacaaacagcttcgcgccgtcgtgttcaaacagcagatcgtctttgtccggctcgctaacactgtcgagcacatagccaaagcccgcgcagcccgtttgcttcacgcctaagcgcacgccgaccatacccggctgctttgccaccagctcacggatgtgtatcgccgctgcgggtgtcagcgttaagccttgccaggcgaaatcttgtgggttaaaggttccactatgcatgtccatcgatttacctcacttcatcgctttcagcgtataacagcatgttagtgataatgattatcagttcaacccagcaaacgcaggggctttaccgtaaaacatgctttttgcctgcttttaataagcatagaccctgatgtgtgggttaacaggcacgctaagaattaggtatctcattgttagataatggttattatctaaggagcattaaggctgtgatgaaaaagaaaaagttgtattgaaaatgactatttaagagataggtaaaaaagtgcagcgttcagaaataagaaaacccttaagtctgtgcgacacaggcttaagggtttctaccccatccggcgcttatctccggcactctcagtggcttagctcttgaaggggcgataagaataatctcataaagctaacccgccgttttaacacaaactgcgattagtattatttttgaacaatatcaggcggtagataagcagtattaagaaggtcatcgaacctggacggaggttaatccaggtcgatttggcgaacttgcggcattaagtcaggatcaatgcacgcccagacgccaggcaaagtagatttcttcttttaattcagcagaagagagagtaagcaggtcagcaaattcaagttctagttgtttcagacgtttgagatattgggcaggactaagattgctctggtcacggcgtaaaaattcaatggccagctgggtgggatcaagttgagtagacatagcatcctcgcttttagacaagacctgcacagtataccaccgtttactgtgcagataatgaccaaaagcaatatgcgtcacacttttctggtgacaacgtcacaaaatggcggtcgtcaatcgactgctacagcacaaacgccctttctcatcgaagatttcaatctgccagacctggtgacggctaccgagatgcaacggtttgcatacgccgcgcacccgcccttctcgtgcgctgcggacgtggttagcattgatttccagaccaaccactttttgctcaccttcggtacataaataaccggcaacggaaccgatactttcggccagtaccacggatgctcctccatgcagcaacccgaaaggctgctttgtccggctgtctactggcattgtcgcttcaagggtgtcatcaccaatatgttcaaagcgaatatccaggaaccccaccatgtttccttcacccatagcattcagtgcttccagggtgattttccgtttccatatcatttaataatctccagtaaagcctgcacaggatggcgtacccccgtgccttcaacccgttttacctggctacggcaggaatatccggtcgccagacagcggttacgcggcagtcgctgcatagcctgatgccaggataactcatagatcccgaggctattttcatggtttttcgcttcatgtccgtaagtccctgccatgccgcagcaacccacgctgacattttccagtttcgcgccaaaacgggcaaatatcgcggcccattgtgctggcgcacccggcaaggcggtaacttcggtacagtgaccaaagaaataccaactttcaccgctgactgtagccactggctgactctcaagtgcgcttgccagccattcattcgccagtaagacgttaaactcgccacgctcctcgcccagcgccagtttatattcatcgcgataacaaagtaccagcgccggatcgacgcccaccattggcatacccagcttcgccatacggttgaggaaatccgccgtctttttcgccgtcttcgcaaaacgattaagaaaacctttaatatgctgggctttgccatttgggctaaatggcagtaacacaggctggaaacctaatttttcgaccagacggacaaaatccgccaccacttgcgcatcgtaatagctggtaaaggggtcctgcaccaccaacactgtgcgcgctttctgctctgcattgagagattcaagctgttccagcgtcatgtttgcgctgcgatgccccaccatttgttgttgtaggctggggacgctcagcagcggcaaatcaaccatgccgatatgtttttcgctgagtttgcgcaccagcggctggttaatgaagaagttaaaggttttcggcgcgcgtgccatcagcggcgcgtagctctcgaccgtagcgacgaggtggtcgcgcagcgggcgtaaataacgggtgtgatagagctgcagaaaacgagagcgaaactccggcacatcaattttgatggggcactgggtgctacacgctttacaggccagacagccgctcatcgcctctttgacttcgtgactgaagtcatattcgcctttattcgcatgccagctattgcgcgtgcgggcaattaacgtccgcaaactgacgccggattcaggcagttcttgttccagtttgagtggatcaacgccgcgatccgccaacaaacgcagccattcacgcaccagcgttgcgcgccctttcggactatgaatccggttctgggtgatcttcatgctcggacacatcggactacgggcatcaaagttgaagcataaaccgttgccgttacactccatcgcaccgcgccactgctggcgtaccgcaatggggatctgccgatcgaatgtaccgcgcttcaccgcgtccactttcatcatcggcgcatcgagaccttctggcgggcaaatcttccctgggttgagtcggttatgcgggtcaaatgccgctttcactttgcgcagttctgcaaaaagttcctcaccgaaaaacgccgggctgtattcagcgcgaaaacctttgccgtgctcgccccacaacaaaccaccgtatttcgcagtcagcgccaccacgtcatcagagatttgcttcatcaaaatctcttgttgaggatcgcacatatccagcgctggacggacgtgcaagacacctgcgtcgacgtgaccgaacataccgtagcttaagccgtggctgtcgagcagcgcgcgaaattcagcaatataatccgccaggtgttccggcggtacgcaggtatcctcagcaaacggaattggcttagcggcacctttggcattgccaagcagaccaacggcttttttgcgcattgcatagatacgttcaacccccgccagctcacggcacacctgccagccgatgacacctgcttgatgactggcgatcagctcatccaaccgcgcacagagtgcatttacccgctcatcaatcagcgcctcatcatcaccagcaaattccacaatgttcagcccgagcatctcttggtcaggcacatcggtaatcaactcgctgacggaatgccagacaatatcttcccgcgccagattcagcactttactgtccaccgtctctacgctaagcgcccgcgcctcaaccataaacggcgcgttacgcagcgcagagtcaaaagagtcatatttgacgttcaccagacggcgcactttaggcaagcgtgtaatatccagccgcgcttcggtaataaaggccagcgtcccttcactacccgtcagaatgcgcgtcaggtcgaactcggtcatctcatcgttaaagacatgacgcagatcgtaaccggtaagaaagcggttaagtttggggaagttgtcgataattaactggcgttgctgacggcaacgttgataaaccgtgttataaattcgcccgattgtggtattggatttacccagcgtttccgccaattcgacgggtaaaggttgcgtatcgagaatatcgccccccaacaacaccgcgcgtacgccaagtacgtgatcactcgttttgccatagaccaggcttccctgaccggatgcatcggtattgatcatcccaccgagcgttgcccggttgctggtgctaagttccggcgcaaaaaagtagccgaacggtttcaggtactgattgagttgatcttttatcaccccggcctcaacgcgcacccagccctcttcagggttaatttcgatgatgcggttcatatggcgggacatatcaacaataatcccctggttgagcgcctgaccgttagtgccggtgccgccgccgcggggggtaaagatcaggctactatagcgttcctgcgcggcaagacgggcgatcagcgccacatctgcggtactacgcggaaataccaccgcatcggggagaagttggtaaatactgttgtcggtgctcattgtcagacgatcggcataacttgtcgccgtatcgccggtaaaaccttgttgctccagctcttgcaaaaaattaagcaccagttgaacgacgccgggtgcctgggaaatctgtggaatcattatattgaccctttcctgcggtctgtgatgtaggtcgatacactattctttcaggctgctgcaatagcgcactgaaaggtgatgtttgtttactctatggatttcgtgttgcaggaaggcggcaagcgagtgaactccaggagcttacaatagtaagtgactggggtgaacgaacgtagccgcagcacatgcaacttgaaatacgacgagtaaatcgtttgcgtgttgcctgagttgttgtaccacatttttttctaacacgcccatcagaattaagggcagaatcggcctgttaaaaaccgctgaaattgctcatcattatgcaggtgagtttcgcgtgttcacgtcgcgtcgacgatttgacgcacaaaaaaggtgaaaagtagttatggtaaatgttcgtcagcccagggatgtcgcacaaattctgcttagcgtgctgtttttagccatcatgattgtggcatgtctgtggattgttcaaccctttattctcggctttgcatgggccggtacggtggttatcgccacctggccggtattgttacgtttgcaaaagatcatgtttggccgccgctctctcgccgttctggtgatgacgctgttattagtgatggtgtttatcatccctattgctttgctggttaacagtatcgtcgacggcagcggcccgctaattaaagccatttccagcggtgacatgacgttacccgatctggcgtggcttaataccattccggtgattggcgcgaagctgtatgcaggctggcacaacttgctggatatgggggggacggcgatcatggcgaaagtccgcccttatattggcaccaccaccacctggttcgttgggcaggcggcgcatatcgggcgctttatggtgcattgtgcgctgatgcttctcttcagtgccctgctgtactggcgcggtgaacaggtggcacaaggcattcgccattttgcaacccgtctggcaggcgttcgcggagatgccgccgtgctgctggcggcacaggctatccgcgcggtggcgctgggtgtggtggtgacggcgttagtacaggcagtgcttggcggtatcggcctcgccgtatccggcgtaccttatgcaacgttgctaacggtgttaatgatcctctcctgccttgtccagcttggcccgttgccggtactgattccggcgattatctggctctactggactggcgataccacctggggaacggtattgttagtgtggagcggtgtggttggcacgctggataacgtcatccgcccaatgttaattcgcatgggtgccgatttaccgctgatcctgattctctctggcgttattggtggtttgattgctttcgggatgatcggtctgtttattggtccggttctgttagccgtttcctggcgtctgtttgccgcgtgggtggaagaagtcccgccgccgacggaccaaccggaagaaattctcgaagaacttggcgaaatcgagaaaccgaataagtaatttctcatcaggcggctctgccgcctgattgttaaccaccgctaattgatatttgcttgctcttccccatattttcctgcttaccgccattcagctggtagtacctgtcgcaaattctttacagtttttaaactaatgagacgaatctgatcgacgcaaaaagtccgtatgcctactattagctcacggttataaatcaacatattgatttataagcatggaaatcccctgagtgaaacaacgaattgctgtgtgtagtctttgcccatctcccacgatgggcttttttttaacatttttccgcttcgctacctcgcccctcactctttccaataatgttgcacaagatactgtgactctcttcaagccgtcagcaggctgataatgttatttatattttattgtttatttcatgcagccattacacgatgaacgcttatgaactccaggcactccgccatatttttgccatgactattgatgaatgcgcgacctggattgcccagaccggtgacagtgaaagctggcgtcagtgggaaaatggcaagtgtgccattcctgatcgtgtagtcgagcaactgttggctatgcgtcagcaaagaaaaaaacatcttcatgccatcatagagaaaataaataaccgcatcggcaacaacaccatgcgttttttccccgacttaaccgcatttcaacgagtctaccctgatggcaattttattgactggaagatctatcaaagcgtagctgctgaattatatgcacacgatctggagcggctttgttaatttttccacagaaaggaattgtcgttgttacaacaataatgaacggatgctgacacaacatcgcttcactttttaaagcacctttgctaagtagaacctatgaaaaatccctatttccctaccgcacttgggttgtattttaattacctggtgcatggtatgggcgtccttttgatgagcctgaatatggccagcctggagacactttggcagactaatgccgcgggtgtcagcatagttatcagtagcctgggcattggtcgattaagtgtcttgctttttgcaggattattatccgatcgctttggtcgccgcccttttatcatgctcgggatgtgctgctatatggccttcttttttggcatcctgcagaccaataacatcattatcgcttatgtttttggctttctggcgggaatggcaaacagttttctcgatgcaggcacttatcccagtttgatggaagcttttccacgcagtcctgggacagccaatattttaattaaagcatttgtttccagcggacaatttttattaccgctaatcattagcctgttagtgtgggctgaactgtggttcggttggtcctttatgattgctgcaggcattatgtttattaacgctctgtttttataccgttgtacgttcccaccccatccgggtcgtcgcttacctgtcataaagaaaaccaccagctctacggaacatcgctgtagtattatcgatttagccagttataccttatatggctatatcagtatggcaacgttttatctggttagccagtggctggcacagtacggacaatttgttgcaggcatgagttacactatgagcatcaaactactcagtatctacaccgtgggtagcctgctttgtgtatttattaccgctccactcattcgtaataccgttcgcccaacaacattactgatgctgtacacctttatcagttttattgctctgtttaccgtctgcctgcatcccacattttatgtggtgataatatttgcttttgtcattggttttacctctgctggaggtgttgtgcaaattggcctgacgttaatggctgaacgtttcccttacgctaaaggtaaagctacagggatctattacagtgcgggcagtattgcgacctttactattccgttgattacggctcatctgtcccaaagaagtattgccgatattatgtggttcgataccgccatcgctgccatcggttttttactggcactgtttatcggcttacgcagccgcaaaaaaacgcggcatcacagcctaaaggaaaatgtcgctccgggtgggtaatgcaatattcttttcaggtcatgcaagatcttacggataaataactctttctgcgctaactaaggaaaatcgcgatcaaaaacaaactatgacatgcaatattcctggaaacataaactttatgccatgtacccagggaaaatcatcttcagtatagtaattatgtaaaccgtcggagaacaatacgtacggtaacgaaattatctttcagcaaggagctgtgaaaatgtctcaaaataaggctttcagcacgccatttatcctggctgttctttgtatttacttcagctacttcctgcacggcattagtgttattacgcttgcccaaaatatgagttctctggcggaaaagttttccactgacaacgcgggcattgcctacttaatttccggtatcggtttggggcgattgatcagtattttattcttcggtgtgatctccgataagtttggtcgtcgggcggtgatattaatggcagtaataatgtatctgctattcttctttggtattcccgcttgcccgaatttaactctcgcctacggtctggcagtgtgcgtaggtatcgctaacagtgcgctggatacgggtggctaccccgcgctcatggaatgctttccgaaagcctctggtagcgcggtcatactggttaaagcgatggtgagttttgggcaaatgttctacccaatgctggtgagctatatgttgctcaataatatctggtacggctatgggctgattattccgggtattctatttgtactgatcacgctgatgctgttgaaaagcaaattccccagccagttggtgggcgccagcgtaactaatgaattaccgcaaatgaacagcaaaccgttagtctggctggaaggtgttagtagcgtactgttcggtgtagccgcattcagcaccttttatgtgattgtggtgtggatgcccaaatatgcgatggcttttgctggtatgagtgaagctgaggcattaaaaaccatctcttattacagtatgggcagcttggtctgtgtctttatttttgccgcactactgaaaaaaatggtccggcccatctgggctaatgtatttaactctgcactggcaacaataacagcagccattatctacctgtacccttctccactggtgtgcaatgccggagcctttgttatcggtttcagtgcagctggcggcattttacagctcggcgttagcgtcatgagtgagttttttcccaaaagcaaagccaaagtcaccagtatttatatgatgatgggtggactggctaactttgttattccactgattaccggttatctgagcaacatcggcctgcaatatatcattgttctcgattttactttcgcgctgctggccctgattaccgcaattattgtttttatccgctattaccgcgttttcattattcctgaaaatgatgtgcggtttggcgagcgtaaattttgcacccggttaaacacaattaagcatagaggttaaaggagttaattatggatgttaccgcaaaatacgaattgattgggttgatggcctatcctatccgccacagtttaagccccgaaatgcagaataaagccttagaaaaagcgggattgccatttacctatatggccttcgaagtggataacgatagctttcctggagcaattgaaggattaaaagccctcaaaatgcgcggaactggtgtaagcatgccgaacaaacaactggcgtgtgaatatgttgatgaattaacaccagctgccaaactggtgggggccatcaacaccatcgttaatgatgatggctatctgcgtggctataacaccgacggcacgggccatattcgcgccattaaagagagcggttttgatatcaaaggcaaaacgatggtgctgttaggggccggtggtgccagtacggcaattggcgcgcagggggcaattgaaggtttaaaagaaattaaactctttaaccgtcgggatgagttcttcgataaagccctcgccttcgcgcagcgggttaatgaaaacaccgattgtgtcgtcacggtcaccgatctcgccgatcagcaagcctttgctgaagccctggcttccgccgacattttaaccaatggcacaaaagtgggtatgaaaccccttgagaatgaaagtttggttaatgatatcagtctgttacatccgggacttctggtcactgaatgcgtgtataacccgcatatgacgaagttattgcagcaggcgcaacaagctggttgcaaaacgattgatggatacggcatgttgttgtggcaaggggctgaacagttcacattatggactggcaaagatttccctctggaatatgttaaacaggtcatggggttcggtgcctgacaggctgaccgcgtgcagaaagggtaaaaaatgaaaaccgtaactgtaaaagatctcgtcattggtacgggcgcacctaaaatcatcgtcagcctgatggcgaaagatatcgccagcgtgaaatccgaagctctcgcctatcgtgaagcggactttgatattctggaatggcgtgtggaccactatgccgacctctccaatgtggagtctgtcatggcggcagcaaaaattctccgtgagaccatgccagaaaaaccgctgctgtttaccttccgcagtgccaaagaaggcggcgagcaggcgatttccaccgaggcttatattgcactcaatcgtgcagccatcgacagcggcctggttgatatgatcgatctggagttatttaccggtgatgatcaggttaaagaaaccgtcgcctacgcccacgcgcatgatgtgaaagtagtcatgtccaaccatgacttccataaaacgccggaagccgaagaaatcattgcccgtctgcgcaaaatgcaatccttcgacgccgatattcctaagattgcgctgatgccgcaaagtaccagcgatgtgctgacgttgcttgccgcgaccctggagatgcaggagcagtatgccgatcgtccaattatcacgatgagcatggcaaaaactggcgtaatttctcgtctggctggtgaagtatttggcagcgcggcaacttttggtgcggtaaaaaaagcgtctgcgccagggcaaatcagcgtaaatgatttgcgcacggtattaactattttacaccaggcataagcaataatatttcggcgggaacaccctccccgccgaactaaaaaatatattcaatcgtatttaataaaaatatttcgtgagtctctgtgcgctaattctccatttggcgtagggaaaatcacatctgaatcaggaattaacaatgaaacctgtaaaaccacctcgtattaatggacgagtgccggtcctgagcgcacaggaagcggtgaattatattcccgacgaagcaacactttgtgtgttaggcgctggcggcggtattctggaagccaccacgttaattactgctcttgctgataaatataaacagactcaaacaccacgtaatttaagcattattagtccaacagggcttggcgatcgcgccgaccgtggtattagtcctctggcgcaagaaggtctggtgaaatgggcattatgtggtcactggggacaaagcccgcgtatttctgaactcgcagaacaaaataaaattattgcttataactacccacaaggtgtacttacacaaaccttacgcgccgccgcagcccaccagcctggtattattagtgatattggcatcgggacatttgtcgatccacgccagcaaggcggcaaactgaatgaagtcactaaagaagacctgattaaactggtcgagtttgataacaaagaatatctctattacaaagcgattgcgccagatattgccttcattcgcgctaccacctgcgacagtgaaggctacgccacttttgaagatgaggtgatgtatctcgacgcattggttattgcccaggcggtgcacaataacggcggtattgtgatgatgcaggtgcagaaaatggttaagaaagccacgctgcatcctaaatctgtccgtattccgggttatctggtggatattgtggtggtcgatccggatcaaacccaactgtatggcggtgcaccggttaaccgctttatttctggtgacttcacccttgatgacagtaccaaacttagcctgcccctaaaccaacgtaaattagttgcgcggcgcgcattattcgaaatgcgtaaaggcgcggtggggaatgtcggcgtcggtattgctgacggcattggcctggtcgcccgagaagaaggttgtgctgatgactttattctgacggtagaaacaggtccgattggcggaattactagtcaggggatcgcctttggcgcgaacgtgaatacccgtgccattctggatatgacgtcccagtttgatttttatcacggtggcggtctggatgtttgttatttgagttttgctgaagtcgaccagcacggtaacgtcggcgtgcataaattcaatggtaaaatcatgggcaccggtggatttattgatatcagtgccactagcaagaaaatcattttctgcggcacattaactgcgggcagtttaaaaacagaaattaccgacggcaaattaaatatcgtccaggaaggacgggtgaagaaatttattcgggaactaccggaaattactttcagcggaaaaatcgctctcgagcgagggctggatgttcgttatatcactgagcgcgcagtattcacgctgaaagaagacggcctgcatttaatcgaaatcgcccctggcgtcgatttacaaaaagatattctcgacaaaatggatttcaccccagtgattagcccagaactcaaactgatggacgaaagattatttatcgatgcggcgatgggctttgtcctgcctgaagcggctcattaacaggagtataatgatggatttttctttaactgaagaacaagaactgctgctggccagtattcgcgaactgattacgactaactttccggaagagtatttccgcacctgcgatcaaaacgggacatatccgcgtgagtttatgcgggcgctggcggataacggtatttccatgcttggcgtgccggaagaatttggtggtatccctgcggattacgtcacccaaatgctggcgctgatggaagtgagtaaatgcggtgctccggcatttttaattaccaacggtcaatgtattcacagtatgcgccgtttcggttctgcagagcagctacgtaaaacggcagagagcaccctggaaacgggtgatcccgcctatgccctggcgttgacggaaccaggtgctggcagtgataacaacagtgccactaccacttacacgcgtaaaaacggcaaggtctacatcaacggacaaaaaacctttattaccggtgcgaaagagtacccgtatatgctggtgctggcgcgcgatccgcaaccgaaagatcccaaaaaagccttcaccctgtggtgggtcgactccagtaagcccggcattaagattaacccgctgcataaaatcggctggcatatgctcagcacctgcgaagtctatctcgacaacgtggaggttgaagagagcgacatggtgggcgaagaaggaatgggtttcctcaatgtgatgtacaactttgagatggagcgcctgatcaacgccgcgcgcagcaccggctttgccgaatgcgcctttgaagatgccgcccgctatgccaaccaacgtatcgcttttggtaagcccattggtcataaccagatgatccaggaaaaactggcgctgatggcgattaagatcgacaacatgcgcaacatggtgctgaaagtggcatggcaagccgatcagcatcagagtctgcgcaccagcgcggcgctggcaaaactgtactgtgcacgtaccgcaatggaagtcattgatgatgcgattcaaatcatgggcggtctgggctataccgatgaggcgcgcgtctcccgcttctggcgtgatgtccgttgtgaacgtatcggcggcggtacagacgaaattatgatttacgtagcaggtcggcagatcctgaaagactatcagaacaaataatctgcaggcggcgcagcttcttaacaaactgcgccgccagatttatccaacaagacttaccggttgaggaaattcagataggatttcttgttccgcaaaacagtttttaaattgtctacggtaatcgctggggctacaaccgacatggcgcaaaaacagtttggcaaagtgatcgacattttcataacccacacgccaggagatctctgcctgacttaattcagtattagtgagactccattttgcttccgtcatacgccgttgaataacatagttaataggggaaatacgatactctttggtaaattcatggcaaatataactgacgctggcacgaaattttttgcttaactgttctaaagtgattttttcgcgataattattattcagatagaaaagaatatcttttatcagaacatcttttttaatatacccctgctcgctacgataagcatttttaaaattttcgtagtaaagaatggctaacgtataggcaaatgcatcccataagctagatgtttggctatttttactttgcggcaaaatcacacttagctcattaaataaggtttttatgacttcttttccctgccccgcggcaattaccggacaagaatgcggttgcagtagctgattttcctcagccccctgaaactgaaagccgtacagcgcacaggtacacgtcgttgccggatcgttaacgtcagaggccaccgcatgcagcctgccgcgttctatcaccacaatgtcatccgcatgtgcgacatataagctagaatcgatggtaaaccttgcaacccctttcttgacgtaaatcaactcggtttcattgtcatgaacgtgatgtccggactcccattttggatcatcgctaaatgcaaaacgactaagccgtggcgttttaccggcgacaaacagcgtttcactggcgttatcaaaacagcgttgatacatgacaacctccctattccatgagcaagcaaaaacaatatatgccggataaaatacggcgtgtattgcggttatacaaccgcgtttagcgagagctaaacaagattatttacactgaatgcaagattgtacggtcatggaataactatattgccgcaaattgcacttttgttttagcgatcgcattttttttgcaagattgttggcaaggaaaacagcttgctccgtcgaaaaccccgcaccgctatcgcacactattttcaggccatttttaccttccatcggagatggttccgtatgcgactcacaggagaaatcatgaaaataataacctgctttaagctggtgcctgaagaacaggacattgttgtcactccagaatacaccctgaatttcgacaatgccgacgccaaaatcagccagttcgatctcaatgccattgaagctgcaagccagctcgcaacagatgacgatgagatagccgcgctgaccgttggcggcagtttgttgcagaacagcaaagtgcgcaaagacgtgctatcccgcgggccgcacagcctgtatttggtgcaggatgcgcaacttgaacatgcactgcctctcgataccgcaaaagcgctggcggcagcaattgaaaagatcggcttcgatttactgatctttggtgaaggttccggcgacctttatgcccagcaggttggcttgctggtcggagaaattctgcaacttccggtgattaatgcagtgagtgctattcagcgtcagggcaatacactggtgattgaacgcacgcttgaagatgatgttgaagttattgaactctctgttccagccgtgctctgcgtcacctccgatattaacgtgccacgcattcctagcatgaaagccattctcggcgcgggtaaaaaaccggtaaatcagtggcaggcaagtgatattgactggagccagagcgcgccacttgctgaactggtcggcattcgcgtaccgccgcaaacagaacgtaagcacatcattatcgataacgatagcccggaggccattgccgagctggcggaacatctgaagaaagccctgaactgaagcctacggagaagaaacgatgagtcaattaaacagcgtctgggtctttagcgataatcctgaacgttatgctgaactgtttggcggcgctcagcaatggggccaacaggtgtatgccattgtacaaaataccgaccaggcgcaggcagttatgccttatggtccaaaatgtctttatgttcttgcgcaaaacgacgcgctgcaacgcactgaaaattacgccgaaagcattgctgccctgctgaaagataaacaccccgctatgttgctgttggccgcgacgaaacgtggtaaagcgctggcagcacggttaagtgtgcaactgaatgcggcgctggtgaacgatgccacggcggtggatattgtcgatggtcacatttgcgccgaacaccggatgtatggcgggttagcgttcgctcaggaaaagatcaacagcccgctggcgatcattacccttgcacccggtgttcaggaaccgtgcaccagtgatacctctcatcagtgcccgacagaaacggtaccttatgttgctccgcgtcatgaaattctctgtcgcgaacgccgtgcgaaagccgcaagcagcgtggacctgagcaaagcaaaacgtgtggttggcgtcggtcgtggactggcggcgcaggatgacctaaaaatggtccacgaactggcggcggtgctgaatgctgaagtcggctgtagtcgtccaattgccgaaggcgagaactggatggagcgtgaacgttatatcggtgtctccggcgtgttgctgaaatccgatctctacctgacgctggggatctccgggcagatccagcatatggttggcggcaacggcgcaaaagtgattgtcgccatcaataaagataaaaatgcgccaatcttcaactatgccgactacggtctggtgggcgatatctacaaagtcgtccctgccctgattagccagttgagccgctaattcccctttcaaccacatctcccgctgtaaacgcagcgggaagggagcataacgcatgagcgatgacaaatttgatgccattgtggtcggtgcgggcgttgctggtagcgttgccgcactggtcatggcacgagccgggctggatgtcctggtgatagaacgcggcgacagtgccggatgtaaaaacatgaccggcgggcgtctttatgcccacacacttgaagcaatcattccaggctttgcagtaagtgcgccggtagaacgcaaggtcacacgcgagaaaatctccttcttaaccgaagaaagcgccgttaccctcgattttcaccgcgagcagccagatgttccgcaacacgcatcttataccgtattgcgtaatcgtctggacccgtggttgatggaacaagccgagcaggcgggcgcgcagtttatcccaggcgttcgcgtcgacgcgctggttcgtgaaggaaacaaggtcactggcgtgcaggctggggatgatattctcgaagcgaatgtggtgattctggctgatggcgttaacagcatgcttggccgcagcctgggaatggttcccgcttccgatccgcatcattacgctgttggtgttaaagaggttattggcctcacaccagaacagatcaacgatcgctttaatattacgggcgaggaaggtgccgcctggctgtttgccggttccccttctgacggcctgatgggcgggggatttctctataccaacaaggattccatatccttggggctggtttgtggattgggtgatatcgcccatgcgcaaaaaagcgtgccgcaaatgctggaagattttaaacaacaccccgccattcgcccgctgattagcggcggcaaactgcttgaatattccgcgcatatggtgccggaaggcggtctggcaatggtgccgcaactggttaacgagggcgtgatgatcgttggtgacgccgcaggcttctgcctgaatttgggttttacggtccgcggcatggatttagccatcgcaagcgctcaggctgccgccacaacggtgatcgccgccaaagaacgcgcggatttctccgccagcagtctggcgcaatacaaacgtgagctggaacaaagctgcgtcatgcgtgatatgcagcattttcgcaagatcccggcgctgatggaaaacccgcgcctgtttagccaatacccacgaatggtagccgacatcatgaacgagatgttcaccatcgacggcaaaccaaaccagccggtacgaaaaatgatcatgggacatgcgaagaaaattgggctgatcaacttgctgaaagatggcattaagggagcaaccgcgctatgagccagaacgctacggttaacgtcgacatcaaattaggcgtcaataaattccatgttgatgagggccacccgcatatcattctggcggaaaatcccgatatcaatgaattccataaattaatgaaagcctgccctgccggactttataagcaggatgacgcaggaaacattcattttgattccgccggttgtctggagtgcggcacctgtcgggtgctgtgcggtaacactattctcgaacagtggcaatatcccgcaggcaccttcggtattgattttcgctacggctaatcatgcatcccacaggcccgcatctcgggcctgatgttctgtttcgagagtccaacatgaaagtgacattaacgtttaacgaacaacgtcgtgcggcgtatcgtcagcaagggttatggggcgatgctagcctggccgattactggcagcagaccgctcgtgcgatgccagacaaaattgccgtggtcgataatcatggtgcaagctacacctatagcgcgctcgatcacgccgcgagctgtctggcaaactggatgttagcgaagggtattgaaagtggcgatcgcatcgcatttcaactgcctggctggtgtgaatttaccgttatctatcttgcctgcctgaaaatcggtgcagtttccgtgccgctgttgccttcctggcgggaagcagaactggtgtgggtgctcaataagtgtcaggcaaaaatgttctttgcaccgacgttgtttaaacaaacgcgtccggtagatttaatcctgccgctgcaaaatcagcttccacaactacaacaaattgtcggcgtggacaaactggctcccgccacctcttccctcagtttaagtcagattatcgccgacaataccagtctgaccacggcgataacgacccacggcgatgaattagctgcggtgctgtttacctccggaaccgagggtctgccaaagggcgtgatgctaacgcataacaatattctcgccagtgagcgggcttattgcgcgcgactgaatctgacctggcaggatgtctttatgatgcctgcgccacttggtcacgcaacgggctttctgcatggcgtaacggcaccattcttaattggcgctcgcagcgtgttgttagatattttcactcctgatgcgtgtctcgcgctgcttgagcagcagcgttgcacctgtatgctcggcgcaacgccgtttgtctatgatcttttgaatgtactagagaaacaacccgcggaccttagtgcgctgcgtttctttctttgcggcggaaccacaatccccaaaaaagtggcgcgtgaatgccagcagcgcggcattaaattattaagtgtttatggttccacagaaagtagcccgcatgcggtggtgaatctcgatgatcctttgagccgctttatgcacaccgatggttacgctgccgcaggtgtagagattaaagtggtcgatgacgcacgcaagaccttaccgccaggttgcgaaggtgaagaagccagccgtggcccaatgtgtttatggggtattttgatgaacctgaattaaccgcccgtgccctggatgaagaaggctggtattacagcggcgatctctgccgtatggatgaggctggctatataaaaattaccggacgcaaaaaagatattattgtccgcggcggcgaaaatattagcagccgtgaagtggaagatattttattgcagcatcctaaaattcacgatgcctgtgtggttgcaatgtccgatgaacgtttaggtgaacgaagttgcgcttatgtcgtgctgaaagcgccgcatcatagtttaagcctggaagaggtagtggctttttttagccgtaaacgggtcgcaaaatataaatatcctgaacatatcgtggtaatcgaaaaactaccgcgaactaccagtggtaaaatacaaaagtttttgttaagaaaagatattatgcggcgtttaacgcaggatgtctgtgaagagattgaataagtttcatcttcggggatcacataaccccggcgactaaacgccgccggggatttattttatttcttcagttcagccaggcttaaccaggtttgcaccacggtgtccgggttcagagacaggctatcgatcccctcttccatcaaccatgcggcaaagtcttcgtggtcggacggaccctgaccgcaaatcccgacatatttgccctgtttcttcgcggcacggatagccatgctcagcagtgctttcaccgcatcgttgcgctcatcgaacaattcagacaccacgccggagtcacggtccagaccgagcgccagctgcgtcatatcgttactgccaatactgaagccgtcgaaatattcgaggaactgctcggccagcaaggcgttggacgggatttcacacatcatgatgattttcagcccgttctcgccacgtttcagcccctgacgcgccagttcttcaaccaccgctttcgcctgatctacggtacgcacgaacgggatcatgatctcaacgttggtcagtcccatgtcgttgcgcacacgtttcactgcttcacactccagcgcgaaacagtcgcggaagctgtcggaaacatagcggcccgcgccacggaagccgagcatcgggttctcttcatctggctcgtaacgctcaccaccgaccaggttggcatattcgttgcttttaaaatcagagagacggacaatgacgcgcttcggataaaacgcggcacccagcgtcgcgatcccttcagtcagacgaccaacgtaaaattcacgcggagaatcaaaacctttcatcatctcgcggatttcgttttgcaactgcggttcctgatcgtcaaactcaagcagtgcgcgtgggtggacgccaatcatacggttgatgataaattccagacgcgcaaggcccacgccttcgttcggtaggcaggcgaagtcgaaagcacggtccgggttaccgacgttcatcatcactttcaacggcagatccggcatcgtttctacgctggagcttttcacgctaaattccagcaactccgcatagacgtaaccggtatcaccttcggcacaagaaacagtgacgttctcaccgtctttcatccgttctgttgcatctccacagcccactaccgccggaatgcccagttcacgagcgatgatcgccgcgtgacaggtacgaccgccacggttggtgacgatggcagatgctttcttcatgatcggttcccagtccgggtcggtcatgtcagtaaccagcacgtcgccaggttcgatgcggttcatttcgctgatgtcatggatgactttcaccggacccgcaccgatgcgatgaccgatagcacggccttcggcgataatcttaccctgactatgcagcgtataacgctccatgacctgaccgcgactgcgcacggtttccggacgcgcctgcacaatgaacagtttaccggtgtggccatctttcgcccactcaatatccatcgggcgaccgtagtgtttctcaatttgtacggcctgttttgccagttcctgcacttcttcgttggtcaggctgaagatgtcacgctgttcctgcggtacgtcttcgattttaacctgcttgccgtgctcctgggtcggcgcgtaaaccatgcggatttttttgctccccatggtgcggcgcacgatagccgggcgattcgccgccagtgtcggtttatgcacgtaaaactcatccgggttaaccgcaccctgcacgaccatctcaccaaggccccatgcggaagtgataaacaccacctggtcaaagccggattcggtatcaatggagaacatcacgccagaacttgcgaggtcagagcgcaccatccgttgaacaccggcggagagcgccacaccacggtgatcgtaaccctggtgcacacgataagagatggcgcgatcgttaaacagagaagcaaatacatgtttcactgccacgagaacggcgtcaaaaccctgaacgttgaggaaggtttcctgctgaccggcaaaagaagcgtccggcatatcttctgcggtggcggaggagcgcaccgcaaaagaggcgttttcgtcatcggcggaaagctgtgcataggcttcgcggatggcgttttccagctcaggctggaagggagtgtcgataatccactggcggatttgcgcgcccgctttcgcaagctgagtaacatcgtcaatatccgttttatccagcagttcataaatgcgctggtttacgccgctttggtccagaaactggttaaacgcgtcggcggttgtggcgaaaccattcggaacggaaacacccattccggaaagattagtaatcatttcacccagggaggcatttttgcccccaaccctgtctacatcattcatgccgagttggttataccaaagcaccagcggactgctgccattgttggacatcgaacaatccttttgtgataaatgaacggtttgagaaacacatttctgcgcatttatctttgcatatttaaccggatgaaaaaaacggtgaatcgttcaagcaaatatatttttttactttttaagactgatcccagcgttgcgcaaatctgctctcttcgacaatttccacataaaccatcggtataaacgaaaccataaaaatgaaatgctgttttcataaaaaataaaattgaaggttcattttataaaccagacataacgttctacgcttctgtgcgtttttaatttatgctttcatagaattatgtctgcatcacgggaagaacaaaatggataatgctgttgatcgccacgttttttatatttctgatggtacggcaataactgcggaggtattaggacacgcagtaatgagtcaatttcccgtcactatcagcagcatcacgctgccgtttgtcgaaaatgagagccgtgcacgggcagtgaaggatcagattgacgcaatttatcaccagacaggcgtgcgcccgctggtcttctactccatcgtgttgccggagattcgcgccatcatcttgcaaagtgaaggcttttgccaggatatcgttcaggcgctggttgccccgctacaacaagagatgaaactggatccaacgccgattgctcatcgtacccatggccttaaccctaataatctcaataaatatgatgcgcgcattgcggcgattgattacaccctcgcccacgatgacggcattagcttgcgcaatctggaccaggctcaggtgatcctgctcggtgtttctcgctgtggtaaaacccccaccagtctgtatctggcaatgcagtttggtatccgcgcggcaaactacccctttattgccgacgatatggataatctggtgctacccgcgagcctcaaaccgcttcagcataaattgttcggcctgactatcgacccggaacgtctggcggcgattcgcgaggaacgtcgggagaacagtcgctatgccagccttcgtcagtgcaggatggaagtcgcggaagtggaagccttgtaccgtaaaaatcagatcccgtggattaacagtaccaattatagcgtagaagagattgccaccaagatcctcgatatcatgggccttagtcgccgaatgtactaaagaactagtgcattagcttatttttttgttatcatgctaaccacccggcgaggtgtgacacacctcgcacttgaaatcagcagcgattggtttatcgtgatgcgcatcacttcccggcagtcctgccgtagaagcaacaaatttctgagacttgtaatgaacagaactgacgaactccgtactgcgcgtattgagagcctggtaacgcccgccgaactcgcgctacggtatcccgtaacgcctggcgtcgccacccatgtcaccgactcccgccgcagaattgaaaaaatactgaatggtgaagataagcgactgttggtcattattggcccctgcagcatccacgatctcaccgctgcaatggagtacgccacccgtctgcagagcctgcgcaaccagtaccagagtcggctggaaatcgtaatgcgcacctattttgaaaaaccacgaactgttgtcggctggaaaggactaatctccgatccagatttaaacggcagctatcgggtaaatcacggtctggagctggcgcgcaaattacttttacaggtaaatgagctgggcgtcccaaccgcgaccgagttcctcgatatggtgaccggtcagtttattgctgatttaatcagttggggcgcgattggcgcacgtactaccgaaagtcagatccaccgcgaaatggctagcgcactctcctgtccggtaggtttttaaaatggtaccgatggcaatacgcggattgctgtggatgctatccgcgcagcccgcgccagccatatgttcctcagcccagacaaaaatggtcagatgaccatctatcagaccagcggcaacccgtatggccacattattatgcgtggcggcaaaaaaccgaattatcatgccgatgatatcgccgcagcctgcgatacgctgcacgagtttgatttacctgaacatctggtggtggatttcagccacggtaactgccagaagcagcaccgtcgccagttagaagtttgtgaggatatttgtcagcaaatccgcaatggctctacggcgattgctggaattatggcggaaagtttcctgcgcgaaggaacgcaaaaaatcgtcggcagtcagccgctcacttacggtcaatccattaccgacccgtgtctgggctgggaggataccgaacgcctggtcgaaaaactcgcctctgcggtagatacccgcttctgaatgcgtgcccattcctgacggaatgggcatttctgcgcaacttgttgtcttctcaacaaattactgcttgctctggtcagccataatattgataataagaatcattgttatatcaattattattaatttttatgcgttatacggatagcagaaaactcacgcctgaaacggatgccaatcacaagaccgcttccccgcagcctattcggcgaatttccagccagacactgttaggtccggatggcaaactgattatcgatcatgacgggcaagaatatctgctccgtaaaactcaggctggcaagctgctgttgaccaagtaacctttaactgctgcagctgacttccagccgtttaccccagtcaggtggacgactgacatagtcatcatctctgtcgctgaaaggatttcgcaacgcctcatgcaggcggtgcaattccgtcatatcacccttttctgccgcttcaatcgcccgttgcgccaaccagttgcgcaataccagagcggggttaacgctttgcatcagttgctgacgctcactatcgctaacctcgtcttgttgcaaacgcccccgataacgggcaaaccagtcatcaaatgccgcacgatcaataaactcatcacgtagcggactcgccgcgctgtgctgctcggtcagactcagcatgcggaatgtgcgggtataatcgctgcgctctcgcgccatcagactgaataattcattcagtagcgcgttatcctctttttgctccgtcatgaagcccagtttctgccgcatccgttctccataatgcgtcaacaaaacctgctgatagctgtccagggcctcattcagggcatctacggcaacaaatgggctcaatgtctgcgccagacgctgtaaattccacaacgcgacggcaggttgattatcaaagctgtaacgcccttgatgatcgctgtgattacaaataaaaccgggttcgtaatcatcaagaaaaccaaacggcccgtaatcaagcgtcagccccagcaggctcatgttgtcggtattcatcaccccatgagcaaagccgaccgtctgccattgggcaattaagctcgcggtacgtgcgacaacatcgctaaaccagagacggtatttgtcctcatcatctgcaagatgactccagtaatgacgaatagcaaagtcagctaactgacgaaccttttcgctctcgcggcggtagtaaaaatgttcgaaatgaccaaagcgcagatgacttggtgccacacgcatcagcatcgcgcctggctccgccgtttcccgatacactgggctatcgctggtgacgatacttaacgcgcgggtcgtcggaatgcccagataatgcatcgcctcactggcgagactttctcgtatcgtgctacgtaaaaccgcccgtccatcacccattcggctataaggcgtcaggccagcacctttcagatgccagtccattgtagtgccatcagcaagcagttgttcgccgagtaaaatgccgcgcccatcacccagttggcccgcccagacgccgaactgatgaccactgtaaacctgcgccagtggactcataccaggcagtagggcttcgccgccccagacacctgcgccatttttaaacaggctgcttggaatactcagcgtgttagccagttcggtattatgccaaatcagccgggcattatttaaaggcgtaggggaaagtgctgtataggtttctggcaattcatcgcgccagcgggtaacaaaagacagggtcatagatcctcctgtttgatagtgtagacggttactctcgtcttaaacaccagcaaacagaagggttatcgctgaaccaacgtcgttatctgatttatgggaacggcaggccacaggcatccctggagagcatggaaatcgaagggggtaatctgtgccaatatttctgccgtatcaatgcctcccgcaatgatgcaattgcaacaaggggaaatttgcgcctggatcgcacgaataaacggttcgaaggagcggtgcgtgatttgttgctgaataaaacttttatccagcatgacgcgggtgaaaagaccatcaaaaaccgctttcattgtgctattgcctgctcccaaattacctaacacaaggggatacacttggcttaaggataaaagaccgcgattatcttttccttcattgagatgcgggtaattctcattaatcaacagttcaataaacggatattttaatagttcgcctgcgtaattatccctctctaataataatgtagccacttgtggcgttaaattaagccaggcaaagagtttatgttgaataaaaaaatgttggcaactttttagtaattccaactgctcactaaataattgccaatgttgctcctcggtaagttgcgctataacccgactcgtcgggatacgaaccgtaccatcttcactggagaaatgggtaattaactcaacgccgacaaggacttgctggttgtctcttatcggcaggaaatagcaatcagaatgataaagattctccaaaaaaatcttcatggtaaccgtccctctcgaaggatgtttttcagtatccggctaaaagggatgaggccataagacataacaattacagaaggagtaactttcatttgttccatgttaaccactttttcaggggtcctttttttagattatcctgattataaacgaataatccatttacggaatttttgtctgcaaaatactactgtattcaggagtaaatggacggcgatgtatcatcgccgtccatttttcgacatattagattcgtctcgcctgccagaaatttttctgccaatagacattatcaagactggaacgcatcactcccttgctggtagaggcgtggataaattggttgttggtatcgtaaatacctacatgcaaaccattttgtccggaccccgttttgaaaaagaccaggtcacctggcagcaactcgtctttatcaatttgcgtgccaatagaggcttgttgtttggtttcacggggcagctgcaaatcgaaacgatcgcgcatcgtcacaaccacaaatccgctacagtccacaccgcgccgcgtcatgccaccataacgatacggcgtgccatgccagctttgtagctggtcgttcaaaccggcaataacggtaatgctatcagaaagtctggcatttggcggcggtgctttatggtggctacacccggccagaagcagtgctgtgatcaaaataaggcagaaacgcattccgtacggttcctctgttttttattcttgcattaatttagcgtcgtaattacccgattttcaagatactaatgaaatcagatggtgctaatcagcattctgtgaccttcgatatccagacggcgaaaattcatcccataggcctgcgccagatttggcggcgtgagcacctcttccctgcgtccactggccagcatttttccaccttttagcaaccacgcccgatgcgcatgacgcaatgtgtggttgagatcgtgactgctcatcacaatcgccagtccttgctgacacagcgcgctcagaattttgtctaacgcactttgttgcgcaacatcaagactgttcatcggctcatcaagaagcagcaattggcctgcgggattggcttgtggtgtgatttgcaacaccaccgcagcaagacgtacgcgttgccattcaccgccggaaagttgattggtgctacgtccgagtttgtcatcaagagccagcgcccctgcgacatcattcagtagttcggtacgcgttttatcgtgctgatgcagtgtcaggtagtgccagaccggcgttgcaaacggcggcgtctgctgttgactaagataggcgcgatgcagcgcgagttttgttgcggaccatgcttccagtggttgccccgcgaactgaatgcttcccttaccgctggtcattccggccattcgcgccagtaaggtactcttacccgcgccattcggccccaccaggtgcaggatctccccagcccgaacctcgccagaaagcggccccaggcgggtagattccgcaacatcttgtaactgcatcacaatagacattattttgccaacgccagtttaatgctttccatcacaatgggatcttccggcgtcatatccggggaaaaacgctggatgacttttccgtccctgccaaccaggaatttttcaaaattccataaaatatcatccgggtacagcggtgcacggcctttgctgaccatacgggcatagaatccgctctcttccggcgcgactgcggtcggcgctgcggcaatcaatttttgatacagcggatggcgtccttcgccattaacttcaatcttactgaacatcgggaacgtcaccccccatgtggtggtacagtaagttttaatctcttcatcgctgcccggttcttgttccagaaactggttgcacgggaatcccagcaccataaaacctcgatcgacccaggctttctgaatattctccaactgctcatattgcggcgttaagccacacttactggcgacattgacaatcaacagcacattaccggcgaacttctccagcgtggtcacttcaccgtcgatatctttcactacggtcgtcagaatggaatcttgcatcgtttctcctgggtgtggtcagtaaaaatcttagcttttaatcatagaccgtctttttgcggttaacgtcctgcttttaacaataaccagataaacaccggcgcacctaacgttgcggtgaccacgccaataggcagctctgcggcagctaatgccaggcgcgctacaatatcggccagcagcaatgcgctcgcccctgccagcgcgcagccgggaagtaatacgcgatgatcggttaaaccacacaaccggagaatatgggggatcaccagaccaataaagccgatagcacccgccagcgccacactgacgccaaccatccagccggtcgctgccaccagcacattgcgccagaaccacaggggtaaacccagttgccgcgcgctgatctcgccaagtgctaacatattcatcggcctggactgacaacagatccacaacaacacggggatcaatgccagcatcagccagctttgccgccagtctacgccgccaaaaccgcccatcatccagtacatcagctgacgcaaatcaacactggtggaaaagtagatagcccacgtcattagtgcgctacagataatccctaatgcaacgccagccagcaataaccgactggtgctaagatgacgacgggcgaaacgtaagagtattaaagtgatgataagcgcgccagcaatcgcacacagccctagcgcccagttggggagttgcccttgcccaagcaataccgcggcgataagccccacgcctgcgccgttagagacgccaagtagtccaggttctgccagaggattttcaaacaacgcctgcattacagcgccggatatagccagcgccgcaccaaccagcaatacagccagcgtacgtggcaggcgaatttgccagacgaacagttcgccacgaggagtaaaccagtcacctgggctgatccattgttcaccggcgcaaaggcttaagagaagcgccagcagcatcaaaacactcaggcataataaccagcgaatattttgtcgctgttgttggcgggcaagtgtcagcatggtatccgttctgctgaagtgtcatggcgttgattttacggtgactcttcgacagtgaaaagaaaaaaggccgcagagcggcctttttagttagatcagattactcgtctttggggctagcgttttcgacccggctttttaacttctgcccgggtctgaaggtcaccacgcgccgtgctgtaatgggaatatcctcgcccgttttcgggttacgtcccgggcgttgattcttatcacgcagatcgaagttaccaaaaccagagagtttcacctgttcgccgttttccagagcgcgacggatctcttcgaaaaacagttcaaccagttctttggcatcccgcttgctaagcccaagcttatcaaacagatattcactcatttcagcttttgtaagcgccataggttcaatccctcaaacttgcctggaatcgctcttttaatgcctctacacatttggcgacggtagcggcaatctcctcttcttcgagtgtacggctggtatcttgcaggatcaggcttatggcgaggctcttatacccctccgcaacacccttaccgcggtacacgtcaaataagtttacgccaactacctgatttacgccaactttcttacattcggataaaatatccgctgcgggaacgttttctgcgaccaccaccgcgatgtcacgacggttcgccgggaagcgagaaatctcgcgcgcctgaggcaccacgcggtctgcgagcttgttccactccagttcgaacaccagagtgcgaccgttaagatccagtttacgttccagttcaggatgaacaaccccaacaaaaccaatacgttcacctttcagataaatcgctgcggattgccccggatgcagtgccggattcgcttctgcacggaactcaacctcattcagtttaccggtcaggtcgagaacggattcaagatcgcctttcaaatcatagaaatcaacggtctcttttgccaggttccagtgctcttcgtaacggttaccgcaaatcacaccggctaacatcagatcctgacgaatgcccaacggtgcctgagtatctggtacgaaacgcagaccgctttcgaaaatgcgcacacggttctgctgacggttctggttgtacaccacggttgccagcaggccagtccacagagaaagacgcattgcactcatttcaacagagatcgggcttggcagcagtaaggcttcaacgcctggatggatcatctgctgcactttcggatcaacgaagctgtaggtgatcacttcctgatagcctttgtcgttgagcagcgttttcacgcgcttgaggctcaggtcagcttcacggtgagtacccataatcaggcttgcctgtaccggctcatccgggatgttgttgtagccgtaaacacgcgcgacttcttcaaccagatcttcttcaatctccatatcgaaacgccagctcggcgcaactgcctgccattcgtctttgccttcggtcacttcgcagccgagacgacgcagaatgtcagttacctgctcatccgcaatatgatggccgatcaggcgatccagtttgctacgacgtagagtgatggttgcacgcttcggcagcgttgcttcgttggtgatatcaattaccgggccagcctcaccaccgcagatgtcgatcagcagacgggtcgcacgttccatcgctttgtgctgcagtgccggatcaacgccacgctcataacggtgagacgcatcggtatgcaggccatgacgacgagcacgaccggtgatagacagcgggctaaagaacgcgcattccagcagcacgttttgtgtttcgtcattcacgccagagtgttcgccaccgaagatgccgcccatcgccagcgccttgttgtggtcggcgatgaccagagtgtcagcattcagcttcgcttcagtaccgtcgagcagcaccagcgtttcgccctctttcgccatccgcaccacaatgccgccttcaatgcgatctttatcgaaagcgtgcatcggctggcccagttcgagcagcacatagttggtgacgtcaacaactgcatcgatagaacggatcccgcaacgacgcagtttttctttcatccacagcggagttggcgctttaacgttaatgccttttaccacacggccaagataacgcgggcaggcttccggcgcttcgactgtaatcggcagcgtgtcgtcgatggtcgcaccaaccggaacgatttccggttgaaccagcggcagctggttcagcacggcaacgtcacgcgcaacaccaatgatgcctaagcagtcggcacggtttggcgtcacgctgatttcgatggtgttgtcatcaagtttcaggtattcacggatatcggtgccaatcggcgcatccgcaggcagttcgataatgccgctgtgatcgtcagaaatgcccagttcagagaaggagcacagcatcccttcagacggttcgccacgcagtttcgccgctttaattttgaaatcacccggcagaacagcaccaatggtcgctaccgctacacgcaggccctgacggcagtttggcgcaccgcagacgatgtccagcaggcgatcgccgccgacattcacttttgtcacacgcagtttgtcagcgttcggatgctgcgcacactcaaccacttcaccaacgaccacgccgtggaagctgccggcaaccggttctacaccgtcaacttccaggcccgccatagtgatttgatttgccagcgcatcgctatcaatcgccgggttcacccattcgcgtaaccacagttcactgaatttcataatctattcctgccttatttaaactgtttgaggaaacgcagatcgttttcgaagaaactacgcaggtcggtgacgccgtaacgcaacatagtcagacgctccatccccatcccgaaggcgaaaccagagtaaacttccgggtcgatgccaacgttacgcaacacgttcggatgcaccatcccgcagcccagcacttccagccatttaccgtttttacccatgacgtccacttctgcagaaggttcggtaaacgggaagtaggaaggacggaagcgaatctgcaaatcttcctcaaagaagttacgcaggaagtcgtgcagcgtgcctttcaggttggtaaagctgatgttggtatcaacaatcagaccttccatctgatggaacatcggcgtgtgagtctggtcgtagtcgttacgataaacacggccaggcgcgatgatacgaatcggtggctgctgggctttcatggtgcggatctgtacgccagaggtctgggtacgcagcaggcgggtagtgtcaaaccagaaagtgtcgtggtcagcgcgcgccgggtggtgaccaggaatgttcagagcatcgaagttatgataatcgtcttcgatttccggcccggttgccacggtaaagccaagctcaccgaagaaactttcgatacggtcgatggtacgggtaaccggatgcagaccgccgttttcaatgcgacgacctggcagagagacatcaatcgtttccgccgccagacgcgcattcagtgcagcgctttccagttccgctttacgcgcattcagcgcctgctgaacctgctctttcgcttcgttgataaccgcaccagctgccggacgctcttctggcggcagctcacgcagggtcgtcatctgaagggttaagtgcccttttttacccaaatattcgacgcgcacattatctaacgcggcaacatcactcgcctggctaatggccgccttcgcactggcaaccagttctgcgagatgactcatggttttcctcattgtgtcagtggtgacactggttcgttggacttagagcctatcccatcaggctattttacttgccattttggtcccgggctgtgctcgaaattctcacgtacttaaatacgctccggtttctccgcgctggccgtgtccagtctggctgcgacaattacacctgatgagacaggctttttatttttcaaaacgcgcatacaaaaaaagcctccactgggaggctttcaggcgctgttttccgtttctcttctcacgcgctagcctcctggattcaggtgctaaagtaaaaaaagaagcggaaaatagcagcattcattgcttgcgttaccttttggtactcttcaaaagacctttattgaaaaggctacggcgataaaagtcaatgttttgatggcgttgaaacgaaaagagggagactagctccctctttcaactggcttatgccagagctgctttcgctttttcaaccagagcggtgaacgctactttgtcgaatactgcgatatcagccaggatcttacggtcgatttcaacagaggcttttttcaggccattgatgaatttgctgtaagaaataccgttctgacgtgctgctgcgttgatacgcgcaatccacagttgacggaactgacgcttacgttgacgacggtcacggtaagcatactgaccagctttgataacagcctggaaggcaacgcggtatacgcgagaacgcgcaccgtagtagcctttagcttgtttcaaaattttcttgtgacgtgcacgtgcaataacaccacgttttacgcgagccatatgtgctctcctgtatctatattctaattaaaaagttaaaaacgttaacggcttatgcgtacggcaggcacgcgattaccaggcccagatcgcctttggaaaccatggctttcggacgcaggtgacgtttacgtttggtcgcttttttggtcagaatgtgacgcaggttagcgtgcttgtgcttaaaaccacctttaccggtttttttgaagcgcttagcagcaccgcgtacggtcttaatttttggcattttaataacttccacttcgcattgttaataaacgaaacaaaggcgaacaaagcctgtgaagcccgaaggctccacagacagtgctacttgaaggccttactgtttcttcttaggagcgagcaccatgatcatctggcggccttcgatcttcgttgggaaggattcgaccactgccagttcttgcaaatcgtctttcacgcgattaagcacttccataccgatttgctggtgcgccatctcacgaccgcggaaacgcagcgtgattttggctttatcaccctcttcgagaaagcgaatcaggctgcggagttttacctgatagtcgccttcatctgtaccaggacggaatttaatttccttaacctggataactttttgctttttcttctgttccttagaagacttgctcttttcatagaggaatttgccgtaatccattatacgacaaaccggcggctcggcgttagggctgatctcgactaagtctactccggcttcttctgctttctccagagcttctctcagactcacaataccaagctgctcgccttccagacctgttaagcgaacttcctgggcgcgaatttcgccattgatacggttagggcgcgccgtttgaactcgttttccgcctttaataccttattcctccaattgtttaagactgcggctgcgaatctcttgttgcagcttctcgatcacttcatttacgtccatgcttcccaggtctttaccacggcgggtgcgaacggtaactttgccactttccacctctttatcaccacagaccagcatatatgggacgcgacgcaaagtgtgctcgcggattttaaagccaatcttctcatttctcaagtctgctttaacacgaatgcccgcattacttagtttttgcgtcaattcgttaacgtattcagactgactatcggtaatattcatgataacaacctgaaccggcgcaagccaggtcgggaagaaaccagcgaactcttcggtcaggataccgatgaaacgttccatgctccccagaattgcgcggtgaatcattaccggtactttacgttcattgtcttcgcctacataagaagcgctcagacgagacggcaaagagaagtccagctgtactgtaccgcactgccatgcacgatcgaggcagtcatacagggtaaattcaattttcggaccgtagaaagcgccttcacccagttgatattcaaacgggatgttgttttcttccagcgcaaccgccaggtccgcctcagcacgatcccacatttcgtcgctgccaatacgtttttcaggacgagtggagagtttgacgacgatcttctcgaagccaaaagtgctgtacatatcatagactaaacggatacatccgttaacttcatcgcgaatttgttcttcagtacagaagatatgcgcgtcatcctgggtaaatccacgcacgcgcatcaggccatgcaggctaccactcggctcgttacggtggcagctaccaaactcggccatacgcagcggcagatcgcgataagacttcagcccctggttgaaaatttgtacgtgacccgggcagttcatcggcttaatgcagtattcacggttctcagaagatgtggtgaacattgcatctttgtagttgtcccagtgaccggttttttcccacaggacacggtccatcatgaacggacctttaacttcctgatactggtactctttcagtttagaacgaacaaacacttccagttcacggaagatggtccagccgtcgttgtgccagaataccatacccggcgcttcttcctgcatatggtacaggtcgagctgtttaccgattttacggtggtcgcgtttcgcggcttcttccaggcgctgcaggtaagcgttaagtgcttttttgtctgcccacgccgtaccgtaaatacgttgcaacattttgttgttgctgtcgccacgccagtaagcccctgccgttttcattagtttgaaatgatggcagaaacgcatgttcggtacgtgcggaccgcggcacatatcgacatattcttcatggaagtacagacctggcttgtcatcatgggcgatgttttcgtcaagaatggagactttgtagctctccccacggttggcgaaagtttcacgcgcttcgtgccagctgactttcttcttaatgacgtcgtagtttttctcagcaagctcatgcatccgcttctcgagtgcttcgacatcttcctgggttaacgtgcggtcaagatcaacgtcgtaataaaaaccgttgtcaataaccgggccgattgccattttggtatgcggccaaagttgtttaatcgcgtgccctaacaggtgcgcacaggagtgacgaatgatctccagaccttcttcgtctttggcggtaatgatgctcagttgtgcgtcgttttcaatcagatcgcaagcatcaaccagttcgccattaacgcgccctgcgatacaggctttcgccagacctggaccaatgtccagcgcaacatccatggggcttacagcgtgatcgtaatggcgttggctgccatcaggaagagttataacaggcattttatatccttatttgcagtggtgacccacacgaaagatcacatacaaagaaaaatttgtttattaacagttcattgcgaaaccatctagccaacaaatgctaaattggttcgcaatcaggtacacaaatgaaagacattaacctctcaccttccacccggttgagcgatgttaacactaaaaaaagggagattgtacctttccgtttcacattgattcgattcgcaattcgtttgtagtgagtacaccagcaaaacgcttaaagaacaactgataacatcacggtgcgtctgaaaggtttactgcgagcggatttacagcagcataaactgaatccagcaaagttcgttgcgtgatttggcggtagtattttaaacgctcatgagattaatgacgaagtggtcatatcacaatgataaaagtgacacaattcttataacaatttttcgtgcacatttcgttctggcgataataattaatcatcatcctcaaaacctccagatatatataaggcgaacagattatgagtcaaaacgatatcattatcagaactcattataagtctcctcatagattgcacatcgatagcgacataccaacaccttcatcagagcctattaatcaatttgcgcgccagctcatcaccctacttgatacctctgacttaagttcgatgctgtcatactgtgttactcaggaatttaccgcaaactgtcgaaaaatatcacaaaattgttattccactgccctttttaccattaactttgccacttcacccatccatacagaaaatatactcattacattacactataaaaaagaaatcatttccttattactggaaaccacgcctattaaagctaaccatttgcgaagcatactggattatattgaacaggaacagttaactgctgaagatcgtaaccattgtatgaaactgtctaaaaaaatccatagagaaaaaaactatacacccaacagtaaatctcaatggtagtgcatgttttttgcaatctccttctgacgctattttttgtcgccatctgtcattgcaatacgcccttgattcattgagaaatggaaaaggcaaagtcaacctgattaaacattactcctccgttgaatccatacagcagcatgtccccttagtccgggacgcggagttcagagcattacttcgccatcctcctgcagggagtcgcgttatcgcgagtaaggattttggcttcgctttagatattttcttttgtcgaatgatggcaaacaatgtcagtcatatgtccgcgattttatatatagacaatcatactttgtcagtaaggctacgaataaagcagtcagtgtatggacaattaaattatgttgtgtccgtttacgacccgaacgataccaacgttgccgtcagagacacccacaggacagcacggggctttctttcgcttgataagttcatcagttcaggtcccgatgctcagacctgggctgatagatatgttcgcaactgtgcaattgctattctgcccctattacctgtgggagttccaggggctattttcgcgggtattgcatcacgaatgccatttgcccctatacatccatcggcaatgttgttaataatggctacaggccagtctcaacagcttattacattattcaaacagttgcccatactccctgaaaaagaaatcattgaaataataactgcgcagaatagcgttggtacacctgctttatttttggctatgatgaacggacatactgacaacgtgaaaatatttatgcaagaaattcagtcactggtagataatcacatcattcatgaagataatctggttaaattactgcaaactaaaagtgctaacgaaacacctggactttatatctccatgttgtatggattcgatgaaataatcgatatctttctgaatgcattaaccactccaatagcacaagagcttttaaacaaaaaactggtgatgagtattttagccatgaaaatacatgatggtgagccaggattatacgccgcaatggaaaataatcaccctttgtgtgtcacacggttcctctctaaaattaatggcatcgcctttaaatacaagttgagcaaagctaacatcatggatttattaaaaggagctacagcacagggaacccctgcattatacatcgccatgagcaagggtaatgaagacgtcgtgttatcttatatatcgacgctgggtgcttttgcaaaaaaacattcttttagtcaacatcagttatttacactattggccgctaaaaatcatgacaacatgtcagctgttcatatagccattcatcataagcattataaaactgtagaaacatattatgctgctattaatgcaatcagccaaagcctgagttttagtgctgatgaaataaagacgtatttataaccagctatttacgatatatatcgatacataattttatttttttcataaaacgcagaaacagtgaccatgtgcacaacgccacccgacggctgtaataacaaaaaatcccttgatgcctgtcccttttgttacactccgttatcacgcacaagagatatgcaggacactggtatgccgactaaacgctttgataaaaaacactggaagatggtggtggtgctactggcaatctgtggcgctatgttgttgctacgttgggcagcaatgatttggggctgagcagtgacaaacgaagacagccagaccgcataacacggtccggcagataattttacatgctgtagcccaggcttaaggttgtccgacggtcggtatgttccggtgcagactctggaggttcagagttccatgtgacgttgtaagccaccttcagtccaaaatgttcattaatagcaacatttaatgcgctttcggagttcagcgttgtgtcttccgcgccaaagacgctaacaccctgcgtaaatttagcgttgtcagtcaactgccatgcataagccccggaggcatagcccagcggctgggtttcactggcattgtcggtatatttgtcgtaacgcacacctggaccgaattcaaagcggaaactgtgtaccgggccattcaaaaactgacgaccataacccgcggtcaacacatcgcgctctcgatagccgttataacggtctgtcagccagcttgcctgaccaaataaatagtcataatcagttaaattaaaacggctacgcccgcccgccgcatatttttcactagaacgctcatcattagaagaagtattactggcgttcccccacaggctccaggcagtggtgtgtccataccaggtcatggtggtgtcagccgtaagactggagcttttcgtattgccactttgtgcaagatatcctgcgttcagattaccttcgaaaggttttttagcgctggcaggatcatccatgacagtaaaaacggaatcatcggcagctgcattcagactcgcaaacatgccccccgccaacataacgatggcaggaactgtcttcaaaagcttcatttatcaagagtccgtacaacaaaaaaagagaccatcgcggtcccggaaactttcttaaggatcaaagattagcgtccctggaaaggtaacgaattataaaaaggcgcgaataacttagcaatgtattcttatttcattttttgaataagcatgtggcgaaaacagatttttatttatatatatttatctgcaaaattttaaataaagctccaataaatcatattgttaatttcttcactttccgctgattcggtgccagactgaaatcagcctataggaggaaatgatggtacgtatctatacgttgacacttgcgccctctctcgatagcgcaacaattaccccgcaaatttatcccgaaggaaaactgcgctgtaccgcaccggtgttcgaacccgggggcggcggcatcaacgtcgcccgcgccattgcccatcttggaggcagtgccacagcgatcttcccggcgggtggcgcgaccggcgaacacctggttagtctgttggcggatgaaaatgtccccgtcgctactgtagaagccaaagactggacccggcagaatttacacgtacatgtggaagcaagcggtgagcagtatcgttttgttatgccaggcgcggcattaaatgaagatgagtttcgccagcttgaagagcaagttctggaaattgaatccggggccatcctggtcataagcggaagcctgccgccaggtgtgaagctggaaaaattaacccaactgatttccgctgcgcaaaaacaagggatccgctgcatcgtcgacagttctggcgaagcgttaagtgcagcactggcaattggtaacatcgagttggttaagcctaaccaaaaagaactcagtgcgctggtgaatcgcgaactcacccagccggacgatgtccgcaaagccgcgcaggaaatcgttaatagcggcaaggccaaacgggttgtcgtttccctgggtccacaaggagcgctgggtgttgatagtgaaaactgtattcaggtggtgccaccaccggtgaaaagccagagtaccgttggcgctggtgacagcatggtcggcgcgatgacactgaaactggcagaaaatgcctctcttgaagagatggttcgttttggcgtagctgcggggagtgcagccacactcaatcagggaacacgtctgtgctcccatgacgatacgcaaaaaatttacgcttacctttcccgctaacaaaaacattcccccagcattgggggaatcatcaccaacctgtcggcaacgcgtttctccgactatgctcaaaagtcatgtgataacaaaggggtgaactatggccagtggcgatcttgtccgttatgtcataaccgtcatgttgcatgaggatacattgactgaaattaacgagttgaataattacctgactcgcgacggttttttgctcactatgacggatgatgagggaaatatccatgagctgggaactaacacttttggacttatcagtacccaaagtgaagaagaaattagagaactggttagcgggcttacccaaagtgcaaccggcaaagatcctgaaatcaccatcacgacctgggaggaatggaatagcaacagaaaataaatggtttttgggcaataatcagtctgtggtgtgcgttagctcgtgtttttacaccgcattcttgcgctaaccttatgatctggcagacaacatgggagagacatcatgtggcaggcaatcagtcgtcttttgagcgagcagttaggtgaaggcgaaatcgaactgcgtaatgaactgcctggcggagaagtccatgccgcatggcatttgcgctatgcaggacatgattttttcgtcaaatgtgatgaaagggaactgcttcccggttttaccgccgaagccgaccaactggagttactgagccgtagtaaaaccgtcaccgtgcctaaggtttgggcagttggcgctgaccgtgactacagttttctggtgatggattatctcccacctcgtccgctggatgcgcatagcgcatttattcttggtcagcaaattgcgcgtttacatcaatggagcgaccaaccacaatttggccttgatttcgataacgcgctctccacaactccacagcccaacacctggcaacgtcgctggagtacgttttttgctgaacaacggattggctggcagttggaactggctgcagaaaaagggatcgctttcggcaatatcgacgccatcgtcgagcatattcagcagcgtctggccagtcatcaaccgcagccttctctgttgcacggcgatttatggtccggcaactgtgcactgggtccggatggcccgtacattttcgacccggcctgctactggggtgaccgagagtgcgacctggcgatgttaccgctgcatactgaacagccgccacaaatctatgacggctatcagagtgtatccccgctacctgccgatttccttgaacgtcaaccggtttaccaactctacacgctgttaaatcgtgcaaggttatttggcggtcagcatttggttattgctcagcagagtttggatagattattagcagcatgatatgggttgaggataatggccgctccgtgcggccttttgattaaataaacccaagcagagaaaagaacacataacctgcagcaatacaaataaccggcaggatatacagactgaaaaactgcaggaaaatagtatggtgcggaacaacaatacgggactcaatttgttcacgcgttagcccctcttcccctttggctttttccagaatgagttgatcttcaacaccttcccgcaagaagcgcgcctggcgactcatccgggcaccggaatcctgcaacgccagtccgacaaaaatcaggatgaaaatcacccagaacataacgttcacgccaccattaaaattgggcgtcggggagttataccagaatagattcaaaaaaggcgtattcgcctgcatcatatcgatcatgacatgagtaaagtcgagcatgaccgcattaatgccttccttgttttcctgccgggtattcataaatttcagcaaagaaatcaatgtagagatcaatgcaggtataaaaatcacccaacccaaaatccttttcaaaacagcaatgcgtccagcttgttgatacgtcatgagttctccttgattaagacgcgtcgtttcacttagtttacctgtagatatctgttttcgcccattctttaaaggcgatatgataggcgcttaatcataagcacggcttaataccttacacataatgctctaaaggagaggttgtaatgagtaccccgcgtcagattcttgctgcaatttttgatatggatggattacttatcgacagtgaacctttatgggatcgagccgaactggatgtgatggcaagcctgggggtggatatctcccgtcgtaacgagctgccggacaccttaggtttacgcatcgatatggtggtcgatctttggtacgcccggcaaccgtggaatgggccaagccgtcaggaagtagtagaacgggttattgcccgtgccattagtctggttgaagagacacgtccattattaccaggcgtgcgcgaagccgttgcgttatgcaaagaacaaggtttattggtgggactggcctccgcgagtccactacatatgctggaaaaagtgttgaccatgtttgacttacgcgacagtttcgatgccctcgccagcgccgaaaaactgccttacagcaagccgcatccgcaagtatatctcgactgcgcagcaaaactgggcgttgaccctctgacctgcgtagcgctggaagatagcgtaaatggcatgatcgcctctaaagcagcccgcatgcgttccatcgtcgttcctgcgccagaagcgcaaaatgatccacgttttgtattagcagacgtcaaacttagtagcctgacagaactcaccgcaaaagaccttctcggttaatgaccaggggcagtgatctcgctgcccctggttctttatctgaaattgcattcaactgacggattaatcgtcaatttaagagaaagagttacaccgtcaccacttccgtgcactgtataaaaatcctatactgtacgtatcgacagtttagtgagttttatcatgacggcggaaggtcaccttctcttttctattgcttgtgcggtatttgccaaaaatgccgagctgacgcccgtgctggcacagggtgactggtggcatattgtcccttccgcaatcctgacgtgtttgttaccggacatcgatcacccaaagagctttcttgggcagcgattaaaatggataagtaaaccgatcgcccgcgcttttgggcatcgtggttttacccacagtctgctggcggtatttgcgctgctggcaaccttttaccttaaggttccggaaggctggttcattccggctgatgcgctacaaggaatggtgctgggttatttgagccacatacttgccgatatgctgacacccgccggtgttcccctgctctggccatgccgctggcgtttccgcttgcctatcctggttccccaaaagggcaaccaactggaacgttttatctgcatggcattatttgtctggagcgtatggatgccccatagtttacccgagaacagcgctgttcgttggagtagccaaatgatcaataccttgcagatccagtttcatcggcttattaagcatcaggttgaatactaaaaaggcaaaaatcacctttctggaataagcaattccatttgaatataagagccagctcacagttctgttaatcttgcgccaacactatgactgctacgcagtgatagaaataataagatcaggagaacggggatgaactttccattaattgcgaacatcgtggtgttcgttgtactgctgtttgcgctggctcagacccgccataaacagtggagtctggcgaaaaaagtgctggtgggtctggtgatgggtgtggtttttggccttgccctgcataccatttatggttctgacagccaggtacttaaagattctgtacagtggtttaacatcgttggtaacggctatgttcaactgctgcaaatgatcgttatgccgttagtcttcgcctctattctgagcgcggttgcccgtctgcataacgcatctcagttaggcaaaatcagttttctgaccatcggtacgcttttgtttaccacgctgattgcggcgctggtcggtgtgctggtcaccaacctgtttggtttgacggctgaaggtctggttcagggtggtgcagaaactgcacgtctgaacgccattgaaagtaactatgttggtaaagtctctgatctgagcgttccgcagctggtcttgtcctttatcccgaaaaacccgtttgccgatcttaccggagccaatccgacgagtattatcagcgtggtaatttttgccgcattcctcggcgtagctgcattgaaactgctgaaggatgatgcgccgaaaggtgaacgcgtcttagccgctatcgataccctacaaagctgggtgatgaaactggttcgcctggtcatgcagttgaccccttacggcgttctggctctaatgaccaaagtggttgcaggttctaacttgcaagacatcatcaaactgggaagtttcgttgtcgcgtcctacctcggtctgctgattatgtttgcagtgcatggcattctgctgggcattaatggcgtgagtccgctgaagtacttccgtaaggtatggcctgtgctgacgtttgcctttaccagccgttccagtgctgcgtctatcccactgaatgtggaagcacaaacgcgtcgtctgggcgttcctgaatccatcgccagtttcgccgcctctttcggtgcaaccattggtcagaacggctgcgccggtttgtatccggcaatgctggcggtgatggttgcgcctacggttggcattaacccgctggacccgatgtggattgcgacgctggtcggtattgttaccgttagttccgcaggcgttgccggtgtcggtggtggtgcaactttcgccgcactgattgtactgcctgcgatgggcctgccagtaaccctggtggcgctgttaatctccgttgaaccgcttatcgacatgggccgtacggcgttaaacgttagtggcagcatgacagctggcacgctgaccagccagtggctgaagcaaaccgataaagccattctggatagcgaagacgacgccgaactggcacaccattaattcttatgctggcaacggtccgttttgtataggggccgttgccttactttttaaatgttccatcgcggcgatgcatacactctcatatttaaacagatcgtcagcgaaaaaaatgtccaacttatcaatacattcctggctcaaactatgtgcctgtaggctgaagcttaaaacctcatacccgagacgttttctaagactactatctggaatactcataatatcttcaagcacaccacttcccattcccggaagatttagtggattaaaaagaagattgatattaagcatacttattatgctaggaaactttaggagactctcatttttttgaatcgcagcaaaaatgctcccgacaggatgtatataattttgttcatagtatatagtccttaaatagtgaataaccaacctgttttttatactgatcaaattggtcattttttctgggcgaaatacagaagtgacatccattccaataaaatctttatttatacctcttatccgaatttcactaccataaagattattaattattactctatatttaacattgtcctgcagatatgtatcaaaactaagtgctggcgctcctggcttactggcatcatagttaatgttagacatataggcaatcatataattaaagttactttctgctatttcatcgcagtcacattgacccgtacttataaagaaagtgagtgctgtcatagtagactgcagcctttctttaaaagagtcgaaagccaggcttttaatatttaaatcaccataattactctgtattaagtttgtagaaaacatctcccgcctcatattgttaacaaaattattatctcatttaaatctaagtcatttacaatataagtttaagagcgacgccacaggatgaactatcaaaaatagctcatcatgattagcaaaacttaaccattttaaaataaataaacaattaaagaaaaaagatcacttatttatagcaatagatcgtcaaaggcagctttttgttacaggtggtttgaatgaatgtagcaacgaaatacagaatttcaggtcatgtaactcccggcaaaaccgggaggtatgtaatccttactcagtcacttccccttcctggcggatctgatttgcccaacgttgggcagattcaggcacagtaaacgccggactgcgcagaaaactctctcccatcagtacaaacgcaacatatttgccacgcagcatccagacatcacgaaagctatccatctttatcgcatgttctggcggcgcgggttccgtgcgtgggacatagctaataatctggcggttttgctggcggagcggtttcttcattactggcttcactaaacgcatattaaaaatcagaaaaactgtagtttagccgatttagcccctgtacgtcccgctttgcgtgtatttcataacaccgtttccagaatagtctccgaagcgggatctggctggtggtctatagttagagagttttttgaccaaaacagcggccctttcagtaataaattaaggagacgagttcaatgagccaacataacgaaaagaacccacatcagcaccagagtccactacacgattccagcgaagcgaaaccggggatggacagtctggcacctgaggacggctctcatcgtccagcggctgaaccaacaccgccaggtgcacaacctaccgccccagggagcctgaaagcccctgatacgcgtaacgaaaaacttaattctctggaagacgtacgcaaaggcagtgaaaattatgcgctgaccactaatcagggcgtgcgcatcgccgacgatcaaaacagtctgcgtgccggtagccgtggtccaacgctgctggaagattttattctgcgcgagaaaatcacccactttgaccatgagcgcattccggaacgtattgttcatgcacgcggaagtgccgctcacggttatttccagccatataaaagcttaagcgatattaccaaagcggatttcctcagtgatccgaacaaaatcaccccagtatttgtacgtttctctaccgttcagggtggtgctggctctgctgataccgtgcgtgatatccgtggctttgccaccaagttctataccgaagagggtatttttgacctcgttggcaataacacgccaatcttctttatccaggatgcgcataaattccccgattttgttcatgcggtaaaaccagaaccgcactgggcaattccacaagggcaaagtgcccacgatactttctgggattatgtttctctgcaacctgaaactctgcacaacgtgatgtgggcgatgagcgatcgcggcatcccccgcagttaccgcaccatggaaggcttcggtattcacaccttccgcctgattaatgccgaagggaaggcaacgtttgtacgtttccactggaaaccactggcaggtaaagccagtctcgtttgggatgaagcacaaaaactcaccggacgtgacccggacttccaccgccgcgagttgtgggaagccattgaagcaggcgattttccggaatacgaactgggcttccagttgattcctgaagaagatgaattcaagttcgacttcgatcttctcgatccaaccaaacttatcccggaagaactggtgcccgttcagcgtgtcggcaaaatggtgctcaatcgcaacccggataacttctttgctgaaaacgaacaggcggctttccatcctgggcatatcgtgccgggactggacttcaccaacgatccgctgttgcagggacgtttgttctcctataccgatacacaaatcagtcgtcttggtgggccgaatttccatgagattccgattaaccgtccgacctgcccttaccataatttccagcgtgacggcatgcatcgcatggggatcgacactaacccggcgaattacgaaccgaacagcattaacgataactggccgcgcgaaacaccgccggggccgaaacgcggcggttttgaaagttaccaggagcgcgtggaaggcaataaagttcgcgagcgcagcccaagctttggcgaatattattcccatccgcgtctgttctggctaagtcagacgccatttgagcagcgccatattgtcgatggtttcagttttgagttaagcaaagtcgttcgtccgtatattcgtgagcgcgttgttgaccagctggcgcatattgatctcactctggcccaggcggtggcgaaaaatctcggtatcgaactgactgacgaccagctgaatatcaccccacctccggacgtcaacggtctgaaaaaggatccatccttaagtttgtacgccattcctgacggtgatgtgaaaggtcgcgtggtagcgattttacttaatgatgaagtgagaagcgcagaccttctggccattctcaaggcgctgaaggccaaaggcgttcatgccaaactgctctactcccgaatgggtgaagtgactgcggatgacggtacggtgttgcctatagccgctacctttgccggtgcacctagcctgacggtcgatgcggtcattgtcccttgcggcaatatcgcggatatcgctgacaacggcgatgccaactactacctgatggaagcctacaaacaccttaaaccgattgcgctggcgggtgacgcgcgcaagtttaaagcaacaatcaagatcgctgaccagggtgaagaagggattgtggaagctgacagcgctgacggtagttttatggatgaactgctaacgctgatggcagcacaccgcgtgtggagtcgcattcctaagattgacaaaattcctgcctgatgggaggcggcgcaattgcgccgcctcaaatgatttacatagtgcgctttgtttatgccggatgcggcgtgaacgccttatccggcctacaaaactgtgcaaattcaatatattgcaggaaacacgtaggcctgataagcgaagcgcatcaggcagttttgcgtttgtcagcagtctcaagcggcgcagttacgccgcctttgtaggaattaatcgccggatgcaaggttcacgccgcatctggcaaacatcctcacttacacatcccgataactccccaaccgataaccacgctgagcgatagcacctttcaagctcgcacttgtcaacacatccagctccgttaagcgtgggaaacagtaagcactctgacggatagtattatcgataaacgccggatgacacatcacctccaggctacgatcaccccgatggcctgcgtcatccagcacttgcaggaacaggctctcactgatctcttcaccgtagaatgcactgctgaatccctgggtagtgcgcaggttgaccggcaaatcaaacgccatctgacgatccgcccgcaacgcaatgccctgctctgccgcaaacctggcaacaatcgggaaaatctgcgggaacatatgcacatgatgatggctatcaagatgcgtaggtttgcgtccaaatagctcaatgaaacgcaaatactgactgacaagctcctgagtaatttcttccagcggtaaagcatcttcttctgccaactgccagatccattttcccagcacaccatcgcgggttaaccccggcatagctgtcagtggcttacccatagtaaggacaaagtgcatccctatggccagactcggttcatcacgactcaactgcaccgcatggtcaatagcctgcccattcaccagcgccgtcgtgctcgtgacaatcccattgcgacaggcctcgataatgccgtagttctgacctttgcttaagccaaaatcatcggcattaacaatcagtaagcgttccataatcagcctcggttaatgtgcttttttaagctctgcgatgcagtcggcaaagtttggcagccatttctcgtgcgccagaatcatctcgcgtgccagcagctcagcatcgcgatcggaatgcaccaacggactaaggtttagcgccagtaacacatcgttaaattctccgctaagtgcggcgttactggcagcaatctcgaagcctttaatggtgtgaatcagccccattactttatcatcgaaatgcgtaatgcgcggatgtggcgtcgcgccatcgcgccccagcttacaggtcatttctactgcccagtctgccggaatattatcaatctgcccatgatgcgggatattaacgtaatgttctgcttgcttgtcgttgtagatagcgttgatcacttcgcatgctgcatcagagtaataagccccaccgcgctgttccagttctttcggcttaactttcagctcaggatttttatacagctcaaaaagttgtttctcgactttctgtactacctgcgctcgtgcgccgcctttgtagtattcgcccatttcaatagccagcatctctttctgcttgaagtaatacagcagataagaacatggcagcagattcaagctacgaattaagccctcactaaatggcagatcgaaaatattttttacagaggacgcttttaactgcccactcgccacaccatcaagcaattcggcaaagcggctcttgccatttatcagcacatccttaatgaacaccatatggttgaggccgaacaaatcgatagataaatcatcgctgtctttcagcatcagaacatcgcgaataaacatcttcatgccgatcggaatattacacacgccgataaagcgtttaaatccggtatgacgataaacggcttcagtgaccattcccgccgggttagtgaagttaatcacccatgcattcggacaaagttcttcgacatcttttacgatgtcaaaaatcaccggaatggtacgcagacctttaaacaaaccgcccgcgccgttggtttcctgaccaagataaccatgacttaatggaatacgttcatccagttcacgcgccggtaattggccaacgcgcagttgggtagtaacgaaatcagcatctttcaatgcttcgcggcgatccagcgttttataaagcttcatcgggacgccagcgttatcaatcatccgttggcagagatcgaaaataatatccagtttcggtttaccaccttcgacatccaccagccataattcgctgaccggcaattcgtgataacgcttaataaatccttccagtaactccggggtatagctgctcccgccaccaatagtgacgacttttaatttctggctcataatttctcccttcagtacagaatactgatatctggcatatctgcccccccggacataaataatccagcaacaggacagatatgtgaattgtcaggtataacgacttgctgattaaattcagtcaatttcttacgatagctcttaggcgtaaaggacgttaatttcttaaacgttttaataaacaaactcgggctactataaccggcctcaaacgcaatatccgtcacactatagttggtcatttccagttgttttttggcaaaattaatacggatttcattaataatctgcattggcgttttgccataatatcgttgagtcgctcgcgtcaaatattcctgacttttggcactcaacgccaccatattctccagcgcgctttcactaaactgctctttatcatgcatcttttctaccgtacttttcagccactgcggtacatcatcaatcacctgttcttcgcggtaatgacgtaaacggttaatgacataaaaagtaaccatctcaacaaactcttccagccctgtttcgcggaaattcaaactagaaatcactgtttccacataggtgagaaaagcgttattggtccggtatacctggctagcgacaaagcaataaggcaacaatggcaggtaatgctgctcaaaaaagcgtttactgatcccaacgttcaatatgcgcgtggcaccaaactcataaaaactttgatggtggctacctaacgaaataaaaacaaaatcgccccgttccagtaacacgcgcttaccgttaatctcctggaaataacgcccggttaataccagagtaaattcataatagtcgtgctgatgcagtccgctgatactctcagttttgttatagataaacacatggaagtttttgccattaaacaactgctgttctcgggcagtggcaatttccggcgcgttaatcactggctgcatcatcgactccttatgccttcagtttttcatgaagctcaattaattcagtaatcagttcacgcgcaagcatggacgtcattaaatgatcctgagcgtggaccagcaccagactcactttcatcttaccttcgcccgcatcgccttcaatcagtttcgtctgtaccagatgcgcttcattcaatgccatccgactctgatccatcatggcttttgctgcggcaaaatcgccctgcttcgcctgtttcagtgccgcatacgccaggctgcgcgcttgtccggagttgatgatcagccccatcaccacttcttccagctcttcagcttccgtttgcgtatcgggaatgttatcgagatccatcatacatcgttcctctcttttcttaccggcacgattacccgtaccggcatcgattaaaatttcagggcgttagcgatatcttcttcgctctcttctttatcaatcgcattttgtgctttgttagccaccacaacaaagggcagataaattaacgttgcgatgccaaggttgaagagtgcgaccagcaatgcggcgacgctaccgttggtgttaaagaaggctcccagaccggttggcatggtccacggtgcaatattggtcaccggaggaataatgcccatgtagtacgctgcgagggtgattgccgccagaatcggttgtaccagtacaaacgggataaacatcaccgggttcatgataattggcagaccaaacagaatcggttcgttaatctggaagatgccggacggcagcgccagttttgccacctgacgataatcagcacggcgagaggcgataaagatagccaggatcaggcctaaagtcgcaccactgcccccaaggaaaataaaggagtccagcatcggcttggcccagatatggaaggtcttaccggctgccagcgccgcttcgacggaaccatattgctgataggtcgcgatattttccagtgcccacggcgtcataatgccgttgtccagtgcggtcagcgccagcgcgccatgaataccgaagaaccagagcagtggaacaaagatcacataggcccagcccaccacgctacccaagcttgccagtggggtactgatggtatccataatgatctgatggaagttggtgccccaggtattcaacgcccaggcaataatccccatcacggaaagaataataaagccgggaattaatgcgctgaaggaacggcttacactagcaggtacgctgtcgggcagtttaatgacccaattgcggcggacaataaaggtaaacatttctgccaccaccaggccaataataatcccggagatgatattcgccccacctaaccagtttgcaccaaccgcataggcctcaccgacactatatggggtgacggtcataaatgctgcaacggataacaacccagccgccagcgcatcgactttacgctcttctgccagcgccatgccaataaagaacggtgccattaaagacattattcctaatgttccgttatatacgttgccgccaatacctttcagaccattaagtgtttcaatggtactggcgtcgaggcgaatacctaaggaataaaaaaagctcccctccccaaagcttagaaaaacgttgttaattaatacaaacatggcccccgcaagggttaacggcattaagcgaataaagccatttttgattgcattaacgtgtggctgctttcctattttaactgcaaaagggaggagtaccttttcaaggcttgcaataacattactcatagaaaaatacccttaaaaaccgcaatttaaatattgcggtattgatttatgaaataactctttgacgggaaaatttaaaataaattaatttgctgcggcttttttaatcgctgcaaccgcagccttaagcacgcctaaaccatcgactttgccataaagcaggctgtcaattacttcaaccggtttgttgggtaacaaacgctggatttcgggcaacatataagcaatctgcggccctaataacacgacatcggcattctgacctttttcaccagccagtgtttccggaaatgcttcaataatgaccggaacttcatatttttctgcctgtgcgcgcattttacttaccagtaaagaggtagacatgcccgcagaacaaaacagataaatgtgtttcttttccataaaactgccctcatcgacgattatctgtcagccagacactccgcaagccttaacctgcttccatgctctgggtaacttgcgaaaccaacatgactttttttgtggctgaaaggagtatacggtatagacctgagcaatagtatttctttgaccttataaattgtttctccttgacctgtggttatgaccctcttcacatttcgggcaaataattcgcgaagataattaagaactcaggccaaaaaaaaccggcgcaatggccggtttccgttgttactcaagctttcagacgaattgattacttcgcagcctgtggatcagtgtcgtattcagcacaggtctgataaccggagttgatgacatatccggtatcatctaacgcgacaaagtaggtttctgctttaccatcacgttgacccaggatgtaggtctggcaagtaccgcgagcatggatcatgctcacttcagagctaggtttacccgcaatttgtgcaacctgcgcccggctcatgccttttttgacgtctttcaccacaggctgtacaaactggtctttggtacgatcataagccgtacaacccgccagcatggttaataccgccgctgcactcagaattcctgccatattcttgttcatattccgtcctcttgtttatcagcgtgttagataagcctggaatacattgggcgctttttcaagcccgtgaacgaaacggctccgctttcagaggattcctgtatgacgttttaaccaccattcagcccgctgtcgcttgtcgtttcagtagcaacgggttagctttaaggaagttttgtcttttctgtctggaggggttcaatgacattgcaacaacaaataataaaggcgctgggcgcaaaaccgcagattaatgctgaagaggaaattcgtcgtagtgtcgattttctgaaaagctacctgcaaacttatccgttcattaaaagtctggtgctcgggatcagcggcggtcaggactccacgcttgccggaaagctgtgccagatggcgattaatgagctgcgcctggaaaccggcaacgaaagtctgcaatttattgccgtacgcctgccctatggtgttcaggccgacgaacaagattgccaggatgccattgcctttattcaaccggatcgcgtattaaccgttaatatcaagggcgcggtattggccagcgaacaggcattgcgggaagcaggcattgaactgagcgattttgtccgtggcaatgaaaaagcgcgtgagcggatgaaagcacaatatagcattgcgggtatgaccagcggtgtcgtggtgggcaccgatcatgcagcagaagccattaccggattcttcactaaatatggtgacggcggtacggacattaatccgctgtatcgtctcaacaaacgtcagggtaaacagttactggcggcattagcttgcccggaacacctttataagaaagcgccaacggccgatctggaagatgatcgcccttctctgccagatgaagtggcactcggcgtgacctatgacaatatcgacgactatctggaagggaaaaacgtacctcaacaggtcgccagaacaatagagaactggtatctgaaaaccgaacataaacgccgtccgccaattaccgttttcgatgatttctggaaaaagtaataatttgcacatattggattgtgcgaaaaagagtaatttgttcacgccggatgcggcgtgaacgccttattcgacctataaaactatgcaaattcaatacattgcaggagtcgaataggcctgacaggcgtagcacgtcagacggtgtaacctttgtcatcgacccgcctcttttttaatcgcttcccgcctgttacactggatagataaccagcattcggagtcaacagtggtacggcgtttaacttctccgcggctcgaatttgaagctgcggcaatttatgaatatcccgaacatttacgtagtttccttaatgacttacccacccgaccaggggtgtatctgtttcatggtgaaagtgacaccatgccgctctatatcggcaaaagcgttaacatccgcagccgcgtcctttctcatttacgtaccccggatgaagccgccatgctacggcaatcccgacggatcagctggatatgtaccgccggtgaaatcggcgctctgctccttgaagcgcgattaatcaaagaacaacagccgctgtttaataaacggttgcgccgcaatcgccagctctgtgccctgcaattaaatgaaaagcgcgtcgatgtggtgtatgccaaagaggtggattttagtcgagcccccaacctgtttggcctgtttgccaataggcgcgcagctttgcaagcattgcagaccatcgctgatgaacaaaaactttgttatggcctgctgggactggaaccgttaagtcgcggtcgtgcatgttttcgtagtgcgctaaaacgttgcgccggagcatgctgcggtaaagagagccatgaggaacatgcgctacgcttgcgccagtctctggagcgtttgcgggtggtgtgttggccttggcaaggggcggtggcgctgaaagaacagcacccggaaatgactcaatatcatattattcaaaactggctgtggctgggggcggttaatagcctggaagaagcgacaacgttaattcggacacccgccgggtttgatcacgacggttataaaattctttgtaagccgctgctttccggtaactatgaaattactgaacttgatccggcgaatgaccagcgagccagttgattactgaacttgatccgggctatgaccagcgagccagttgatttcactgaacaacagtttaccttgcggttgtaaaagccgcagggtgtgcctgccatcgaaccagcacgcgccctggtcggtagtgagcaatttatcgcccagttgccacgccccgttaatcacaaacaccaccccgccgcgactgccaaaggtagtaaacgtacgttcggcaattctgactttcgccttacagacatccaggcgtgtcatgatgttgaaatccatgctcatctgccctgccgtcagtttcgcttttaccacctggtccgctgcaaaggcaaaaggctggaacggttttaaggtatggttaaagcggtctgcgctttcaaggagcatctcgccgccttccagcaacgtcactatcctttccatgccgggaaacaaagaaaactccccattcgccgcgatggatgcaatgctggcacgccagtaaaaatcacgttttgccggtgggaacgtgcaaatttcgcgcgtttcaccggcagcatttcgccacagattcacgctcattttacgcatatcaaagtattccatactcgctcccggcccgttcttttcattgttatcgttcaggtaaccgtggatggttatcggcaactcgggtgatttacgttagtggtgatcaggctttttttacaactgtttgagaagagaaaagaaaaccgccgatcctgtccaccgcattactgcaaggtagtggacaagaccggcggtcttaagttttttggctgaaagattattcagcagttgcaggcattttaccttttgccgctggacgttctgtcagacgcttctcaaaattagcattaaattgctttttctgttccggcgtcaggatgttgtaaattttgttctgggtttccatgtgcgccagcatgttagctttgcgctgttcttccatttttgcgatctgcgcttcagcttttactttatcgaaggtatcgctggcaatgatgtcatgcattgcgcggcgttcttccagcggcggacgtttcatctggtcacgctggcctttcatgatttcgcggatctgctgtttctgcgcgtcggtcaggttcaggtctttgaacatcatgtcctgatgcggaccgaacttgcctttgtggtgcatcatcggcttcgcgtcagccggtgctgcggtagtggtgtctgcggcatgggccaggttagccgcgccaagagccagggtagaggcaacaaacagtgcagttaatttacgcatattctatatccttcctttcagttatttattacggctttcttaagtagcgtgccgtgttgacgagattaactttactgactttagcgtcaattaatcagagcaacggtaaaacaatgaaagtgtaaaaaacacttttgcgccaattatggagaaaaaaagaaaatttgatggagagtgatgagagaatattacaacacgatgattttgcagagattatgaagaactataccggatgactggtgataaataaagcaaataaccaggattaatctgtattaatttataagaaagcaacttaatacccgcagaatgatttctgcgggtaagtattagcttattttttcgagcattaatcccgcgcgtaatcccaacgctaccaacggattagggaataacacatactctacatcatgggttacggtaaaacgttcctctccgtcctgcgccagcaatgttcctttctcaaacggcataaaattcagcgtgtcacttgccatatgcatttcgaaggacgggctgtggcgagtaatttggctaaccacccgataacggagcggcggtgttctcacgataccgacactctcaccagatagcagcgcagcaattgcgctggcagttactgcaaactggcgaagatcgttttgcccaaagggcaacgctttgccaagttccagcgtacaggccagcgcgccaaaatgtctggcgctgaaatgggtaaacgtaccaccaggttcctgatggaacaccagcgcctccagccccgccgcacccagccacgtcagaaatttctcgtcccagggaatgtcgcgttgcggtaatacaccgaactgcggatgcaaggagccacgaattgcggtatgtagatcaaggtgccagcgcacagattctttgccctggtcataaaaatcttccaggcactgttccagttcgcgcgcccgacaggtttctccgctttcagcaaatagctgccaacgaccgccaaacattcgattcatatcgctatggcaataacgtttcccttgcttcagcgcaggaggattcccgaggatcaccagcaaccgccaacgtaacgggatctcgccgtgagatatcgcgccaagcaacgcgtccagcatctccacaggtgccgtctcattaccgtgtattcccgcactaatcaccagtgcgccttgcggtggcgttaatggcgtcagttccagcacaccatcgcccagccagcgccagcgaacgccgttgatttctcgctcggtgataaccggttttttacccgttaaggtcagagcaagaaaattatccattgccccctccctcgcgctggaacggataaacgctaccgagattcagtaattggctcaatacatccagtgcttcccgcccttcgcgcagcaattgcgggtcggccagatcggcagcagtaaggcgatcgcggtagtaacgatccacccagtcattgagcgcattaaacagcgtatcgttcatcatcaccgccggattcaccgcccggcgttcttcttctgtcaataccacccgcaaccgcaggcacgccgggccgccgccattcgccatgctttcacgtaaatcaaagacttttagttcgctaatcgggttgtcagcggcaaggagttcattgagataaccccatactccggcgtgttcccgacactcctgaggcagcaccaacatcatggaaccatcatcgcggctcagcagttggctgttaaacagataggtagacaccgtatcagacacggaaacctgagttgccggaacttctatcgccataaaaccattgacccgcgcacgcaggtttgccagtaactgactctggcgagcgaacgcctgttggtggcaaaacagcacctggcggttactcacggcaatcacgtcattatgaaaaacgccctggtcgataacgtccgggttttgctgggcgaaaatcacctgttggggattcacctgattcagccttgccaccgcctcgctggcttcgcgagtctgtcgcgccggataacgggaaggccgggtatcattgccttcttctcgcccgtagacaaaaagttgcatacccggttcaccgtaatgaccgccgagacgattgtggtttgccgccccctcatcaccgagcaacgctacctgtggcaacgcgctatggacgctaaatttctcttcgtcgttaaaaatcgcttttaacaggctttcagtgacgggcgcttccaggctacggtgaaatttattgttcaggttggcaacggtgagatgcactttgccatccagcgtatcggcagatggcgcgatcgttgccgcattggctacccacattgggctagcggaactgacgctggaaagccagtgcggtgcctggcgtgcaactttttccagtacctgctcatcgctaccactgaatcccaactgacgcagcaccggaataaacggacgctcgtgcggcgggatcacggcctgggggaatcccgcatcggcaagggctttcattttcagtaagccctgcttcgccgccagtcgcgggttagacacctgaaaacggtgacgggtagaggcttcattaccaaagctcaggcccgcgtaatgatgcgtcagccctaccagcccgtcgaaattgacttcccaggcgttcatcgcaccacctcatcggaaaaatccagcccggggttaagcgtggcgggcaatgttaagctgtcgctctccaggctcgccatcggccatgcgcagtaatctgcggcataccaggcgctggggcgatggttaccggaagcaccaatgccgccgaatggcgcggtactggcagcaccggtaagcggtttgttccagttaacaatccccgcccgcgcctccagcaacagttgatcgaacttttcccgctcgggggaaaccagaccgcaagagagtccgaagcgagtgttattcgccattcgaatcgcttcatcgaaagtatcataacgccagacgcgcaataacggtccgaacacctcttcatctggtacgccagcaacgcctgtcatttcaatgatccccggcgtcagcaagcttgtccctgcttgtaataagcgcggcgcaagcaggggtcgtccgcccatcgcttccagttgctgccatgcagtaaccacctgctgtgcggcctgttcagaaatcagcccgccaataaacggctgcggttcgtcatcccagttgcccggcgttaatcgctggctgacggcaaccagacgagcaagaaacgcatcgccctgcgccccgcttttcagcaataaacggcgggcgcaggtgcagcgttgaccggctgtgacaaacgcgctctgaatggtcagatggacagccgcgtcgatatccgccacctcatcgataattagcggattattaccgcccatctcaagggcgagaattttctccggctgaccggagagctggcgatgcaactggtagcctgtattggcgctaccggtaaacagcaaaccgtcgagatcctccagcgcactcagcgcctgacccgtttcacgcccgccctgcaccaggttcagcacgcctggcggcaagccagcctgctgccataaacgcattaccgcttcgccactccacggtgtcagttcgctgggtttaaagataatggtgttacctgccagcaatgccggaacgatatgtccgttcggcaaatgaccagggaaattatacggcccaaacaccgccagcacgccgtgcgggcgatgtcgcaggctcgccgcgccgtccggcatttcactacgctgctcgccggtacgaacgtgatacgccttaatacttatcgcgattttattgatcatcgccgtcacttcggttgccgcttcccagcgcggcttacccgtttctctggcaataatcgcggttaattcggctttattgctttccagcagtgcggcaaagcgttcgacaacggcatgacgttcagcaaaactaagccgcgcccagcgcggaaacgccgcacgggctgcccgacaagcctgctcgacctgagcggcatcggcatcattgccttgccataacacctcgccgcttaccggattacgcttcacacggcttgcgccctggcccgttatccagtcaccgttaatccataaagtcatgctgttttctcctctgcgcacaggcgcaccagacgaacgcgatccccggcgtggcatttgagggcatccagttgtgcggcggttaaaatcaaacgctcggttgccggatcggtacgcaccagcaccacgcggaaatggtgataattttcattggcgaccaggcaggctgggaaatcgccctgcgcaggctgcccttctgccacttccaccagccgacttttacggatggcgcgcacgcggtcgatgtcacactcaagcgtcggcccaccgtcaaagatgtcgatatagttacggtagcgaaaaccttctttctccagcaccgcgcgggcaggcgcggtttgcggatgtacctgaccgatgacgtcctgggcttcctgggataaaaagtgggtatagatcggatgtttcggcatcagttctgcaataaatgccttttgcccggtgccgcagagaaaatcggcgcggctaaaatccatgctaaagaagcgtttaccgaggctttgccagaacggactatagccgtgttcgtcaatcaccccgcgcatttcagcaaccactttgtcattaaacttgtcgcgaaaagccgccataaacataaagcggcttttgctcagcaaatagccgttgccctctttgcgccagtccgggtcgagaaacagcgtgcacagctcgctgctgccggtgtgatcgttactgagaaacagcgtcggcaatgcgttatagacattcagctctttactggcgtgaaccaacgtgccgacgcgatagttgtaccagggatcgttcagcccaaccgccacctcaatggcacaaatccccgccacggtgcctgtctcgctatcttccagcacgaacacatagccctgctcacttttgggcagttcgccttgccaggttttgattgccctttcgatacgcgcgctaagcgtggcttcattggcgggaaggctcgtcaggccgccgcccgttttgctggcaagctgcatcagcgcgctgacatcacttcgctcaacgggacggatgaccatcatgatgaacctcggctaacaaattatttcaactactacctcggctaacaaagtgttcgcaagcagctgcaaagcgatccagtccggtcgtcacctcttcttcgctgacattgagcgcaggcgcaaaacgcaccacgttgccacccgcaatcagtaccatcacgcctgctttcgccgcttcctgagagatctgtttcgcttgcccggcgtaatcggcattcagtacacagccaatcagcaaacctaagccgcgaacttcactgaacaaaccatagcggtgattaatagtattaagacgctcaacaaaccagtcgtgacgctgtttaacgccattaagcatctctggtgtgttgatgagctccagcactttgcctgccaccgcgctggccagcggattaccgccataggtggtgccatgagtgccaacggtcatcacgcgggcgcactcttcggttgccaacaacgcaccgaccgggaaaccgccgcccagcgctttggcggtagttaacagatcaggcgtcacgccgtagtgcatataggcatacagttccccggtgcgcccgacgccggtttgtacttcatcaaaaatcaacagcgcattgtggcggttacacaattcacgcagaccttgtaaaaacgcgttgctggctggcaccacaccgccttccccctggatgggttcgacaatcaccgcacaggtagagtcgtcaatcagcgcgctggcagagttaatatcgttatatgcagcatgacgaatatccgccggcagtggcgcaaaatcctgactataggctggctgcccacccgcactgacagtaaacagcgtgcgaccatgaaacgcatttttgaacgccacgatgccgctcttatggctgccgtagcggtcgtgagcgaatttacgcgccagttttagcgccgcttcgttggcttccgcaccggagttacaaaagaagacgcgatcggcaaacgtggcgtcgatcaattttttcgccagtcgcagtaccggctcgttggtgtaaccgttgccggtatgccagaacttactcgcctgttcgttcagcgcttcacgcagttccggatgcgcatggcccagcgcgttcaccgcaatgccacccgcgaagtcgatatactctttcccctgctgatcccacaagcggctaccttcgccacgtaccggtataaagggtgccggagcgtaaacaggtatcatccattcatcaaagttttcacgcgtaattggctgagacatagcgacctctacagtaaataattcgttatttatatgttaataataagtaatgtttgcgctgtaaatgtagattgcagggttcgtgccagccagtgataaaagtgcataaacggcggaggctaactggaaatcaaggagttataaccaaaccatatgcatttaaagtgcatataaagtgaatacgtttgcgatgtgggtgaataaaaagaataaaaaacgcaatgttatgcagaagtaaaatataattctggaattgtgatcattgacgaaatttactggaaattactgcgccattctgacgcagcgcgcaccaaaagcgggcatttttttgcgccatcgttgacatcattaacaaccatcgatcaaatcacttaacaacaggcggtaagcaacgcgaaattctgctaccatccacgcactctttatctgaataaatggcagcgactatgaaatttgtctcttttaatatcaacggcctgcgcgccagacctcaccagcttgaagccatcgtcgaaaagcaccaaccggatgtgattggcctgcaggagacaaaagttcatgacgatatgtttccgctcgaagaggtggcgaagctcggctacaacgtgttttatcacgggcagaaaggccattatggcgtggcgctgctgaccaaagagacgccgattgccgtgcgtcgcggctttcccggtgacgacgaagaggcgcagcggcggattattatggcggaaatccccagtctgctgggtaatgtcaccgtgatcaacggttacttcccgcagggtgaaagccgcgaccatccgataaaattcccggcaaaagcgcagttttatcagaatctgcaaaactacctggaaaccgaactcaaacgtgataatccggtactgattatgggcgatatgaatatcagccctacagatctggatatcggcattggcgaagaaaaccgtaagcgctggctgcgtaccggtaaatgctctttcctgccggaagagcgcgaatggatggacaggctgatgagctgggggttggtcgataccttccgccatgcgaatccgcaaacagcagatcgtttcagttggtttgattaccgcagtaaaggttttgacgataaccgtggtctgcgcatcgacctgctgctcgccagccaaccgctggcagaatgttgcgtagaaaccggcatcgactatgaaatccgcagcatggaaaaaccgtccgatcacgcccccgtctgggcgaccttccgccgctaatttagcagctctcctggctcaaactgggtcaggagaattaaccttgagaaaaatcaacaaactgtcagtaatgatttgttgcctgccgtcctttgttataccgtctctgcgtttttagttgtctgaccacttctctattatcaagtttgatataggaaactccacgatgaacgctgagcgtaaatttctttttgcctgtcttatttttgcgctggtcatttacgctatccacgctttcggtttattcgatctgctcaccgatttaccccacttacagacactcatccgccagagcggatttttcggctatagcctctatattctgttattcatcattgccaccctcttgctgttaccaggaagcatactggtgatcgcgggaggaatagtttttggcccgctcttagggacactactcagtttaattgccgccacgctggcctccagctgcagtttcctgctggcgcgctggctgggacgtgatttactgctgaaatacgttggccatagcaataccttccaggccattgaaaaaggcattgcgcgtaacggtattgattttcttattctgacccgcttaatcccgttgtttccttacaatattcaaaattacgcttacggattaaccacaatcgccttctggccttatacccttattagcgcactcacgaccctacccggtattgttatttataccgtgatggcaagcgatctcgccaatgaaggcattacgctgcgctttattttacaactctgtctggcgggcctggcgctgtttattctcgtccagctcgcaaaactctacgcccgacacaaacatgtggatctgtctgctagccgccgcagcccacttactcacccaaaaaatgaaggataaaacgatgttgcaacattatagtgtgagttggaaaaaaggactggctgcactctgtttactggctgttgctgggcttagcggctgcgatcaacaagagaatgcggcggcaaaagtggaatacgacggacttagcaacagccaaccgctgcgtgtcgatgccaataaccatacggtaaccatgctggtgcaaattaatggtcgtttcctcaccgacgacactcgtcacggtattgtgtttaaagatggctccaacggacataaaagcctgtttatgggttatgcgaccccgaaagcattttatgaagccctgaaagaggcaggtggtacgccgggcgaaaacatgacgatggataataaagaaacgactcatgtcacaggcagcaaactggatattagcgtcaactggcaaggggcggcaaaagcgtattccttcgatgaagtgattgttgacagtaatggcaagaaactggacatgcgctttggcggtaatttaacggcagcagaagagaagaaaacgggttgcctggtgtgtctggatagctgcccggtcggcatcgtcagcaatgcaacatacacttatggtgcggttgaaaaacgtggtgaagttaaattcaaaggcaatgccagtgttctcccggcggataacacgctggcaacggttacctttaaaatcgccgaataaagccaggataaaggatgatgatgatgcaaagccgaaaaatctggtactaccgtataaccctcatcatcctgttgttcgctatgctgctggcatgggcgctgcttcccggcgtccatgagtttatcaatcgcagcgttgcggcgtttgccgccgtggaccaacagggtatagaacgctttattcagtcttacggcgcactggcggcagttgtcagcttcttgttgatgattttgcaggccattgctgcaccgctacctgcgtttttgatcacctttgccaatgcgagcctgtttggcgcgttctggggcggcttgctgagctggaccagtagcatggccggcgcggcgctgtgcttttttatcgccagagtgatgggccgcgaagtggtggaaaaattaaccggcaaaaccgtgcttgacagtatggacggctttttcactcgctacggcaaacacaccattctggtctgtcggttattgccttttgtccctttcgatccaatcagctatgctgccggtttgactagtatacgttttcgcagcttttttatcgccaccgggcttggtcagttaccggcaactattgtttattcctgggcgggcagcatgttaacaggcggtactttctggtttgtcaccggactgtttattctgtttgccctgaccgtggtgatttttatggcgaagaaaatatggcttgaacgccagaagaggaatgcctgatgggtttaccgccgcttagcaaaattcctttaattttacgtccacaggcgtggctgcatcgtcgccattacggcgaggtgctaagccccattcgctggtgggggcggatcccgtttatcttttatctggtgagcatgtttgttggctggctggagcgtaaacgcagtccgctcgatccggtagtacgaagccttgtcagcgcgcgcattgcgcaaatgtgcctgtgtgagttttgtgtggatatcaccagtatgaaagtcgccgagcgcaccggcagcagcgataaactgctggcagtggctgactggcggcaaagcccgctctttagcgatgaagaacggctggcgctggagtacgccgaagccgcaagcgtaacgccgccaacggtcgatgatgccctgcgtacccgactggctgcgcattttgacgctcaggcgctcaccgaactgacggcattgatcggcctgcaaaatctgagtgcccgttttaattctgccatggacattcccgctcaggggctgtgccgtattcctgaaaaacgttcttaaggagagatgatgcgccattgtgggtggttgctgggattgttaagcctgttttctctggcaacacatgccagtgactggcaagaaattaaaaatgaggccaaagggcaaaccgtctggtttaacgcctggggcggcgataccgcaattaaccgctatctcgactgggtgagcggcgagatgaaaacccattacgctataaacctgaagattgtccgtctggcggatgccgcagacgcggtgaagcgcattcagaccgaagccgcagccggacgtaaaacgggcggcagcgtggatctgctctgggtgaacggcgaaaacttccgcaccttaaaagaggccaatttattacaaacgggctgggcggagactctgcccaactggcgctatgtcgacacacagctgccggtgcgggaagatttttctgtgccgacacaaggtgcggaaagcccctggggcggcgcacaactgacgtttatcgcccgccgcgatgttacgccacagccaccacaaacgccgcaagccttactggagtttgctaaagccaatcccggcacggttacctatccgcgcccaccggactttaccggcacggcgtttcttgaacagttgctgattatgctgacgcccgatcccgccgcattaaaagaagcgccggacgatgcgactttcgcccgtgtcactgctcccttgtggcaatatcttgatgtgctgcatccgtatttgtggcgcgaaggaaaggatttcccgcctagtcccgcgcggatggatgctctgctgaaagccggcacattgcgcctgagcctgacctttaaccccgcgcatgcgcagcaaaaaatcgccagcggcgatttgcctgcaagcagttacagttttggctttcgcgaggggatgattggcaacgtgcatttcgtcaccattcctgccaacgcgaatgccagtgctgcggcgaaggtagttgccaatttcctgctcagtcccgatgcgcaactgcgtaaagcagatcccgctgtctggggcgatccttctgttctcgatccgcaaaaactgcctgacgggcagcgcgaaagtttgcaaagtagaatgccgcaggatctgccgccggtactggctgaaccgcacgcaggttgggtaaatgcgctggaacaagaatggctacaccgttacggtacgcattaatctttttgctgtgggcgatggtggcggtgatttatgcaccgctgatcccggcagctctcacgctgataagccctgctttgagcttgacacactggcaggcgttatttgccgatccacagttaccgcaggcattactggcaacgctggtgagcacaaccatcgcggcggtcggggcattgttgattgccctgctggtgattgtggcgctgtggcctgggccgaaatggcagcgtatgtgcgcccgtctgccgtggctgctcgccattccccatgtggcttttgccaccagcgcccttctgctctttgctgacggagggctgctttatgactatttcccgtatttcactccgccaatggaccgatttggcatcggtctgggcctcacccttgcagtgaaagaaagcgcatttctgctgtggatcttagcagcagtattgagcgaaaaatggctgttgcagcaggtcattgtgctggatagcctgggctacagccgctggcaatgcctgaactggctgctgttgccctccgtcgcgcctgcgctggcaatggcgatgctggcgattgttgcctggagcctgagcgtcgtggatgtggcaattattctcgggccaggtaatcccccgacgctggcggtaattagctggcagtggttaacccagggcgacattgaccaacaaacaaaaggcgcgcttgccagcctgctgttgatgctgttactcgccgcctacgttttgctgagctatctgctatggcgcagctggcggcgcactattccccgcgtagatggcgttcgcaagcctgccacgcctttattgccgggcaatacgctggcgatttttttacccttaaccggtgtgctgtgtgtggttctgctggcgatcctcgcggatcagagcacgatcaatagtgaagcgctcatcaacagcctgacaatggggctggtggcgacattcatcgctttgctcctgttactgctgtggctggaatgggggccacagcgtcgccagttgtggctatggttgcccattttattacctgctctgccactggtggcgggccagtacacgctggcgctatggctgaaactggatggaagctggacggcggtggtctgggggcatctgctgtgggtgatgccgtggatgctgtttatcctgcaacccgcctggcagcgcattgatagtcggttaattttgattgcgcaaacactgggctggagccgggccaaaatcttcttttacgtgaaatgcccactcatgttgcgccctgtgctgattgccttcgcggtgggatttgcagtcggtattgcgcagtatatgccaacgctgtggctgggcgcggggcgttttccgacgctcaccactgaggcggtggcattaagcagcggcggcagcaacggtattctcgccgcccaggctttatggcaactgctattaccgcttattatttttgccctgaccgcgttagtcgcaaaatgggtaggttatgtcagacaaggactccgctaatgctctgcgtgaaaaatgttagcctacgtttaccagaaagccgcttgctgacaaacgttaactttacggtggataaaggtgacattgtcacgttaatggggccgtctggctgtggaaaatccactctgtttagttggatgattggtgcactggccgaacagttttcttgtacaggtgagctatggctcaatgagcaacggattgacatcctacccaccgcacagcgtcagattggcattctttttcaggatgcactgttatttgaccagttcagtgtcgggcaaaatttactgctggcgctaccggcgacacttaaagggaatgcccgacgtaatgccgtgaatgatgcacttgagcgtagtggccttgagggagctttccatcaggatcctgccactttgtctggcggtcagcgagcgcgcgttgctctactacgcgcccttctcgcccaaccaaaagcgttactcctggatgagccattcagccgtcttgatgtggctctgcgcgataattttcgccagtgggtgttcagcgaagttcgcgccctggcgatccccgtcgttcaggtaacgcacgatctccaggatgttcctgctgatagttctgttctggatatggcgcagtggagtgaaaattacaacaaactgcgataacgcaaagtttttctcaatgcgtcagttcagaatggcgcactcaaaactacaatgtcgggattttcgatgaaacgtgtttctcaaatgaccgcgctggcaatggctttagggctggcttgcgcttctagctgggccgctgaactggcgaagcctcttacacttgaccagcttcaacaacaaaatggcaaagcgatagatactcgccccagcgcgttttataacggctggccacaaaccttaaatggcccttctggtcatgaacttgccgccttaaacctctctgccagctggcttgacaaaatgagcaccgaacagctcaacgcgtggatcaagcaacataacctgaaaaccgatgctccggtggcgctgtacggtaatgacaaagatgtcgacgccgtcaaaacgcgactgcaaaaagcaggtttaacgcatatctccatcctgagtgacgcgctaagcgaaccttcccgtctgcaaaaactgccgcattttgagcagctggtttatccgcaatggctgcacgacctgcaacaaggtaaagaggttacggcgaaacctgccggtgactggaaagtcattgaagcggcctggggcgctcctaagctttaccttatcagccatattcccggcgctgactacatcgataccaacgaagtggaaagtgaaccgctgtggaacaaagtttctgatgaacaactaaaagcgatgctggcaaaacacggcattcgccatgacaccacggtcattctgtatgggcgtgacgtatacgctgcagcgcgtgtggcgcagattatgctttatgctggtgtgaaagatgtgcgcctgctggatggcggctggcaaacctggtccgacgcgggactgcctgttgagcgcggaacgccaccgaaagtgaaagcggaaccggatttcggcgtgaagatcccggcacaaccgcagttgatgctcgatatggaacaggcccgtggactgctgcatcgccaggatgcaagcctggtgagcattcgtagctggccagaatttatcggtacgaccagcggttacagctatattaaaccaaaaggtgaaatagccggcgcacgttggggacacgctggtagcgacagcacgcatatggaagattttcataacccggatggcaccatgcgcagcgccgatgatattaccgctatgtggaaagcgtggaatatcaaaccagagcagcaagttagtttctactgcggcaccggctggcgcgcgtccgaaacctttatgtacgcacgcgccatgggttggaagaatgtttccgtgtatgacggcggctggtacgaatggagcagcgatccaaaaaatccggtagcaaccggtgaacgcggcccggacagtagcaaataacattgcaattactgacgctggaggctcttcagcgtcagatacccactccacacccgcgtaaaggtcgtcatccagcacaacgcaccgaagatccacgcaaaccacgcaaaccatgcagggaataaacatcccagcacaaacagtaagatcgtttctgtgccttcggttaatccccccagatagtaaaagctcttatgtgcataaccggggttatcaatctgatgttttgctgccagtgcagcaaaggcgagaaaactgctgcccgtgccgataaacgcaaacaacaaccagccgcctgccagcgcattttgctccggtgcagcaagaataaagccaaacggcaccagcgcgtaaaagagaaaatcgagagaaatatcaagaaagccgcccgcgtcggtaagctctctgcgccgcgccagcgcaccgtccagaccatcaagcagcctgttcaacaaaatgacgactagcgccgccagataccagcccagcgccagaaacggcagagccagcacgccgatggcaaatcccactaatgttaaaccatctggcgtaatgcccggtttatcaagaacccgcacgcactgatgcaacaacggtttaatccggggatgaagatggcggtctagcacaggcactccttaaatataaagcctttctgattgagcaacagtgcggatattatggcatttttcgcttatctgcccgtgtgtaatttatgaaaatgattgaagttgttgccgccatcattgaacgtgatggcaaaattttactcgcgcaacgccccgcccagagcgatcaggcgggattatgggagtttgccggtggtaaagtcgagccggatgaaagtcagcggcaggcgctggtgcgtgagttacgcgaagaactgggcatcgaagcaactgtgggtgaatatgttgccagccatcagcgagaagttagcgggcggattatccatcttcatgcctggcacgtacccgacttccacgggacgttacaggcacatgaacatcaggcgctggtctggtgcagtcctgaagaggcgctgcaatatccgctggcccctgctgacattccattattagaggcgtttatggctttacgcgccgccagaccagcggattaattatggctttacgcgccgccagaccagcggattagtgctaagggttttgtcatcacgctggcattgcagcagtattccttcggctttaattaccgccccttcagaataattttgatcctgataaacgcagcactgagtacagggctgcgcactctgcccgccactactgaacacttctggcggtacgtttacctccacgtccggacgataatgcgggttagccagtgcaattaatggaaatgctaatactacggcgaacaatgctcgactcacagggaactccttaacgttattgtctctgctactgataacggtagccgggtggcaaaactttagcgtctgagttatcgcatttggttatgagattactctcgttattaatttgctttcctgggtcatttttttcttgcttaccgtcacattcttgatggtatagtcgaaaactgcaaaagcacatgacataaacaacataagcacaatcgtattaatatataagggttttatatctatggatcagacatattctctggagagtttcctcaaccatgtccaaaagcgcgacccgaatcaaaccgagttcgcgcaagccgttcgtgaagtaatgaccacactctggccttttcttgaacaaaatccaaaatatcgccagatgagtttactggagcgtctggttgaaccggagcgcgtgatccagtttcgcgtggtatgggttgatgatcgcaaccagatacaggtcaaccgtgcatggcgtgtgcagttcagctctgccatcggcccgtacaaaggcggtatgcgcttccatccgagtgttaacctttccattctcaaattcctcggctttgaacaaaccttcaaaaatgccctgactactctgccgatgggcggtggtaaaggcggcagcgatttcgatccgaaaggaaaaagcgaaggtgaagtgatgcgtttttgccaggcgctgatgactgaactgtatcgccacctgggcgcggataccgacgttccggcaggtgatatcggggttggtggtcgtgaagtcggctttatggcggggatgatgaaaaagctctccaacaataccgcctgcgtcttcaccggtaagggccttagttttggcggcagtcttattcgcccggaagctaccggctacggtctggtttatttcacagaagcaatgctaaaacgccacggtatgggttttgaagggatgcgcgtttccgtttctggctccggcaacgtcgcccagtacgctatcgaaaaagcgatggaatttggtgctcgtgtgatcactgcgagtgactccagcggcactgtagttgatgaaagcggattcacgaaagagaaactggcacgtcttatcgaaatcaaagccagccgcgatggtcgagtggcagattacgccaaagaatttggtctggtctatctcgaaggccaacagccgtggtctctaccggttgatatcgccctgccttgcgccacccagaatgaactggatgttgacgccgcgcatcagcttatcgctaatggcgttaaagccgtcgccgaaggggcaaatatgccgaccaccatcgaagcgactgaactgttccagcaggcaggcgtactatttgcaccgggtaaagcggctaatgctggtggcgtcgctacaagcggcctggaaatggcacaaaacgctgcgcgcctgggctggaaagccgagaaagttgacgcacgtttgcatcacatcatgctggatatccaccatgcctgtgttgagcatggtggtgaaggtgagcaaaccaactacgtgcagggcgcgaacattgccggttttgtgaaggttgccgatgcgatgctggcgcagggtgtgatttaagttgtaaatgcctgatggcgctacgcttatcaggcctacaaatgggcacaattcattgcagttacgctctaatgtaggccgggcaagcgcagcgcccccggcaaaatttcaggcgtttaactgtatttaacggaacttgctccccacggaacatttcttatgggccaacggcatttcttactgtagtgctcccaaaactgcttgtcgtaacgataacacgcttcaagttcagcatccgttaactttctgcgatagcagcagatatgccagtaaagaaatcccatttgactatttttttgataatcttcttcgctttcgaacaactcgtgcgcctttcgagaagcaagcattatataatgccaggccagttcttcttcaattgtcccgttttgaaaagctgtgctacttatgctgatcatccaacttaattccgccgcccatattagcttcgcgctggatttaccggagctatgattagcgcaatcagagatatagtcactgggaaaaacagcaaatttattcaacaaggcgataacctgctctggggcttcctccatgtttgctttaaaggtattggctccatggtcgccagaaagaaaatgctccattaaggcacaataactttcgctatcttcgataccccattgatcctctaaagactcgcgtcttttacttatgatatcgatgctgtcaaaaggaagcacatgatattggaaggtatctttgccaggttcaggctttcgcggccagaactccagcgtttcagaccattgcttatgatagaatcgataaggtgcgatcaattgtagcgcctgtaacttctcgatactgagcggctcaatacctttagcctgataataatgcagttgttctttttttgctttaaaaccggcccgaacaataagccccatcataattaatagataaagaaaagagcatcccgcggtaatcaggcctctttcattcaaaccgttggatgttatcgctgcgaacacaaacattacagcgacaacacatgttaaataaaacccccacttacaaagcagcatggccttattttctttaatcatccgttcaaaattactattaaatatttcccagccattaaaagaatacttctcgctcccaggatggttttgtaataaaacttttttcatcacattccctgttattacatactttagaggcgataattttatccatgcaaaaaaaatatccaacgaattttcttgatccgctggatatttcagaatatgactcgaatagcacgaaagattcactcgcttacgctatcgccccgcttccgacttcatctgctggcggactttttttcgcactacgtttacgcggtgcagcctttttcttatcagcactgccaccactgcccggagccacaatgccgcgaaactgccgcaccggcgtacgtttggcttgatcaataagctgatatagcgtccccaccagcggctgcataaagtcctgatagcgacactgcttttcgctgatttgcgtcagcacgctttcccagtgcgcggtcatgtccggtcgcgtcgccatctccggcaggctatggaatagcgcttttccggcgtcggtggagtggatatagcgcccttttttggtcaggaaaccacgcttgaacaacagttcaataatcccggcacgcgttgcctctgtccccagaccatcggtcgcacggaggatctttttcagatctttatcctgcacaaagcgcgcgatcccggtcatcgcgctaagcagtgttgcatcggtaaaatggcgcggcggctgggtttgccgctctaccacttcacctttttcacacagcaactcatcgcctttcgccaccacaggcagtggcgtgccgtcgttttcttcatcgcgctctttgctgcctaacagcgtgcgccagcctgcttcagcaagaaaacgcgctttagcgacaaatttgcctttggcaatgtccagttcgataacacacttgcggaacaccgcatccgggcagaattgcatcagatactgacgggcaatcaggttatagaccttcgcttcgttctccgtcaggttgatcgcagaactccgtgcggtcggaatgatggcgtggtgcgcatcgacctttttgtcatcccaacagcggttgcgtatatctggatctaccactggctgcggcaacagatccggtgcatgaacactgatggcattcatcaccgcgtggcgtccggcaaaatgttcttctggcaaatagcgacaatcagaacgcggataagtgattagcttgtgcgtttcgtacagtttctggcagatatcaagcacgttctgcgcactcagaccaaaacgttttgccgcttcaatctgcaacgcactaaggctaaaaggcagcggcgcggattcactttcccgtttatcgttatagctggtgacaatagccggttgaccactaatgcggttaaccacatgctccgccagtggacgatgtaacaagcgcccttcttcatcctggtacggttcacacgcttcgctcggttgccagatagcggtaaaccgctcatcggcaggtgtcacgatatgtgctttgacttcaaagaagtctttcgccacgaagttttcaatctcttcatcgcggcgcaccaccagcccaagcacgggcgtctgcacgcgtcccacggaaagtacgccctgataaccggcattgcgaccgagaatggtatacgcacgggtcatattgatgccgtacagccagtcggcacgcgctcgcgccagcgcagaaacgcacagcggtacaaactcactgttggaacgaagacggtcgatcgcccgctcaaccgcctgcgggttcaggtcgtttatcaagcaacgctgtacctgctggcgcttttccggtgccagttgcagatagtccagcacttcatccaccagcaattgcccttcacgatccgggtccccggcgtgaacgatttcgctggcttcatgcaggaaccgtttgatgacgttaagttgtttggtcacggagggtcggggctgtaattgccacttttccgggacaatcggcaaatccgcaagattccagcgcgcatagcggctgtcgtaggcgtctggctgcgcctgctcaagcaggtgaccgatacaccaggtcaccacctgaccattaccgcactcgataaagccatcgcctttccggtgcggtttgggcaggacatcagcaatggcgcgcgccagactcggtttttcggcaataaacaaccgcattgaattaacgaatctcaaccatggcacgaccgccgcgcgctggcaccagttcgccaattgccgtcagttcaatgccaaactcggcggctgtagctttgacctcattttctgcttccggcatgaccgccagcagcaaaccgccagaagtttgcggatcacacagcagatcgcgcacttcacgcggcatttcacccatcagatgaccgtagctggcaaagttacgttcagtgccgccaggtactgcgcccaacttaatgtactcttcaacaccggggagtttcgggatcgcttcatagtcgacgcgtgcctgcacaccagccccctgacacatttcgctcaagtggcccagcagaccaaagcccgtaacgtcggtcatcgcttttacgccttcgatgttggcaaaggacgcgcctgcgatgttcatccggcacatcacttccgtcgccagtccctgatgttctggtttcaacagactttttttctcagccgtggtaagaacgccgatccccagcggtttcgtcaggaacagtttgcatccggcttgtgcggtactgtttttcttcacccgctcggtcggtacgatccccgttaccgccagaccaaaaatcggctccggcgcatcgatggagtgaccgccagccagcgcaatacccgcctgacgacatgcatagcgtccaccttcggtcacttcgcgggcaatttctggggaaagtttgttaatcggccagccgaggatcgcaatcgccataatcggtttgccccccatcgcgaagatatcgctgatggcgttagtcgccgcaatgcggccaaaatcgaaaggattatcaacgatcggcataaagaagtcggtggtactgataacgctggtgccattgcccagatcgtacaccgccgcatcgtcgcgggtttcattacccacaagcaaattcggatcaacaaacttcgcctgctcactatgcaggatggtttccaacacttttggggaaattttacagccgcaaccagctccgtggctgtattgggtcaaacgaatgctgttctcgctcatggacatctcctgtcaatgcaatccgggtatggtaaccctcattccgtgaagtgataagtgagagtgtctgaattcctgcgcctttgctcacaatccagacagtttcgcgacaattatcagaaataagttacaaacggcgtcgggtccgggacgttaatgctcgtagatgctttcagctgcggcgtaccgaggtagagaaaaccgacaattttatcctgctcacggcaaccgaatgcttcacgcactaccggactttcagttaatgcgccactgcgccagatgccgccaaacccctgggcaactgctgccatttgcatcgccatgaccgcgcatccggcagacatttcctgttcccagcgcgggactttatgattctcttcgcatttcgccaccaccgtgatgatgagcggtgcgcggaacggcgcattacgggctttgtcgatagctttgtcatcactaccggcagcaatcgccccctgttccagtacggcgctgaaacgctcgcgcccttccccttcaatcacaaaaaaatgccacggttgcatggacttatggtccggcgcacgcatacccgcacgcaggatgttttgcagttgttcacccgttggcgcgggttcagccaagcgggaggcgctacggcgattgatcaatagttcgagtgcatccatttgattaactcctgtcgtgatatttattcacaaaattaacacgagagtggattttgttacagcacagtccgcaattcctgctgacaagtaccggttgggtcattacgataaccacatctattgcgcctgtgacaggtgtgaccttaagttgggagaatacatgcgaaccctttggcgatttattgccggattttttaaatggacgtggcgtctgctgaatttcgtccgtgaaatggtacttaacctgttctttattttcctcgtactggttggtgtggggatttggatgcaggtcagtggtggtgatagcaaagaaacggccagtcgtggcgcactgctgctggacatttctggtgtgatcgtcgataaacccgacagttctcagcggtttagtaaattaagccgccagctgcttggtgccagttccgatcgtctgcaggaaaacagtctgtttgatatcgtcaacactattcgccaggcgaaggacgaccgcaatatcaccggtattgtgatggatctgaaaaacttcgcaggcggcgaccaaccgtctatgcagtacatcggcaaagctctgaaagagtttcgtgacagcgggaaaccggtttatgccgttggcgagaactacagccaggggcaatattatctcgccagtttcgccaataaaatttggctgtctccgcaaggcgtggttgatctgcacggctttgccaccaacggtctgtactacaaaagcttgctggataagctgaaagtttccacccatgtgttccgcgtgggtacgtataaatctgccgttgaaccgtttattcgtgatgatatgagtccggcagcccgcgaagctgacagccgctggattggtgagctgtggcaaaactatctgaatactgttgccgctaaccggcagatccctgctgagcaggtattccctggcgcgcaagggttgcttgagggtttaaccaaaaccggtggcgataccgcgaaatatgcactggaaaacaagctggtcgatgcactggcaagcagtgcggaaatcgaaaaagcactgaccaaagaattcggctggagtaagactgataaaaattatcgcgccatcagttattacgattacgcattgaaaacgccggcagataccggtgacagcatcggtgtcgtctttgctaatggcgcaattatggatggcgaggaaactcaggggaatgttggcggtgataccactgcggcacaaatccgcgacgctcgccttgacccgaaagtgaaagcgattgtcctgcgtgttaatagcccaggcggcagcgttaccgcgtctgaagtgattcgcgctgaactggcagcagcccgggcagcgggtaagcctgtggttgtaagcatgggcggcatggcggcatctggtggttactggatttccacgccagctaattacattgtggctaaccccagcaccctgaccggttctatcggtatcttcggcgtgatcaccaccgtagaaaatagtctggatagcattggtgttcatactgatggtgtcagtactagtccgctggcggatgtttctatcaccagggcactgccgccggaagcgcagctgatgatgcagttaagcattgagaatggctataaacgctttatcacgctggttgctgatgcgcgtcatagcacgccggagcagattgataaaattgcccagggccacgtctggaccggtcaggatgcaaaagctaacgggctggtcgatagtctcggggatttcgatgatgcggtcgccaaagcagcagagctggcaaaagtgaaacagtggcatctggaatattacgttgatgaaccgaccttcttcgacaaagtgatggacaacatgtctggttctgtccgggcaatgttgccagatgcgttccaggccatgttacctgcaccgctggccagcgtagcctctaccgttaaaagtgaaagtgacaagctggccgcgtttaatgacccacaaaaccgttatgcgttttgcctgacctgcgccaacatgcgttaagtcttgtactgagtggccgacagatcgtcggccacattattttttacgtcgacgaatcctcttcccgctgtttcgccccatatttccttatccgcatagtatcaggtgcgctccccctgcctcacgtatatacttttgctctttcgatatcattcatatcaatatcatgcaaaagaaaagtatttacgttgcctacacgggcgggaccatcgggatgcagcgttccgagcagggttatataccggtgagtggtcatctacaacgccaactggcgctgatgccggaattccatcgcccggagatgccagatttcaccattcatgaatatacgccgctgatggattctagtgatatgacgccggaagactggcagcatattgctgaagatattaaagcgcactatgacgactatgatggttttgtcattctgcacggcaccgacacgatggcgtataccgcctctgcgctgagcttcatgctcgagaatctcggtaaaccggtcattgtgacagggagtcaaatcccgctggctgagttacgctctgacggacaaattaatctgctgaatgcgttgtacgttgcggcgaattatccgatcaacgaagtaacgctctttttcaataaccgattgtatcgcggcaaccgcactaccaaagcccatgccgatggttttgatgcgtttgcctctccaaaccttcctccgttactggaagcaggtatccatattcgtcgtttgaatacgccacccgccccgcacggtgaaggggaattaatcgttcatccaatcaccccacaaccaattggcgtagtgacgatttatccagggatttctgctgacgtcgtgcgcaattttctgcgccaaccggtgaaagcattgattctgcgctcctatggcgtgggtaatgcgccacaaaacaaagccttcctgcaggaattacaagaagccagcgatcgcggtattgtggtggtcaacctgacacaatgtatgtccggtaaagtgaacatgggtggttatgccaccggtaacgccctcgcccatgccggcgtaattggcggtgcagatatgactgtagaagccacgctaaccaaactgcattacctgcttagccaggaactggatactgaaaccattcgcaaggccatgagccaaaacctgcgcggcgaactgacgccggatgattaaggagactgtaatgccccctcgcgccctgttactggtcgatttacaaaatgatttctgtgctggtggcgcgctcgccgtgccggaaggtgacagtacggtggatgtcgctaaccgcctgattgactggtgccagagccgcggtgaagcggttatcgccagtcaggactggcacccggcgaatcacggcagttttgccagtcagcacggtgtagagccttatacgccaggccaactcgacggtttgccacaaaccttctggccagatcactgtgtgcagaacagtgaaggcgcacaattacatccgttactgcaccaaaaagcgatcgcagcggtgttccataaaggcgaaaatcctttagttgacagttacagtgccttttttgataacggccgtcggcagaaaacctctctcgatgactggttacgcgatcatgaaatcgatgaattgatcgttatgggcctggctactgactattgcgtgaagtttaccgtgctggacgcgttacagttaggttataaggtaaacgtgattaccgatggttgtcgtggcgtgaatatccagccccaggacagtgcgcacgcgtttatggagatgagtgcagctggggcaacgctatatacgctggcagactgggaagagacacaggggtaattttacgctggcctacaattctgtactggcattgtaggccaaataaaacacgtcagtggcacatctggcaattgatgccatcaacgaaagatttaattcacctcagaaatctcttccaagctcaccttccgcgtttcgatgccaaaaatggagagaaccagcgcacagagcaataacataacaccaagtaccataaacaccgtgatgctcccataatgtgttaataatgccgcaacgccatagggcgtgaagactgcgacgatccgtccgacggcattaacgaaaccgctaccgcgcaggcgtaaatgcgttggccaaagctccgggatataaaccgcgctcgcgaagcaaacatacatgtataaaaagaagatcatcaccagtccatagattaaaatcgcccactctgtagtctgaatactatagatatagcctaacacggcaataataataagtaaggtggagccaaataaccgacgaggaaaatgatcaataattaatgccgcaataaatattcctaccggagcgccaatcataataacagcggtcattaatatacttttatcgacatcaatgccggagttaacaaatatggtcggtatccatacggtgatggtataaaggctaatgttcattgcaattaaaacagtaatcgcgactaatgtacgtcgtaacatttcacctttaaacaggagccagaaagtacccttgattactttaaccttgctgttgctctgatagctagtaagcgggggtaaacgaatactcttctctctttcaatttgctgctctacttcacgaagttggcattctgcacctgcgatttgccctttccctgccagccatcgtgggctctcgataaagtatttaccactgagaaaccaggctaacagtatgccaataccacccagcagaaacattattcgccaactaaaaaaagcgataaccaccacgcctatcgccgcagacagcatggggctccagttaccaacaaaactgagccgcgcggaccattttccacgcaccgtcgcggggataaactccgtaaaactggcatagccaaccataatcagcgcccccattcctgttcccatcaggaagcgaaagaagatgagccagtacatatcagggacaaaagcggcccctgttgcagcaataccgacgatgagaagatttatgcgaaacgccctgcgccgcccaaagtagtcaccaataaacccaccagtaagactgccgatgaaataaccaaacattaatgcgctggtaaaggcggcattgaggaaattattactccatccattgcttaccagctttgctaagacgacattaccggagtaactcaaaaaccctgttaataacagactaaagcttataataccaaatatacgataatgaaaccgggccaaaggcaagcggtccagtcttgcgccaatttgatcatattgttccattaggtgcctcggatttgctaaaaaggtagcaattgcggcaaattcacttgccgcatctttatcatcattttatttcaaggcgcaggaacaaataatattgacaacgtgtgcttaaattaccacaccagctggatattattgtctttgcaaaatgctatccactctgcacccggacttttatcagttattatgtaattaatatgactaaaatcagctaactggacaaaagctttgcgatcaaacttagagtgatcaaccaataacgcaacttctgtcgcctgacggatcattgtctttttgatttcagcttccgcttcattagagtccagcgcgccgctgttaatatcaagacctttacaactcattaccatgatatcgacatgatagcgcctgatgatctctttagtaattcttccttgcagactaagtgtatttttgtttagttccccacccgtactaacgactttaatttcactctgagccagaacatgaatcgcttccgcgctgttggttagcaacgtcaggccactacggtcctgtaacaatttgagcaattccattacggtactactggaatcggctgccatggtggttttattgtcgataaagggtagtgccttgcgtgcaataagctgcttctcttcataaaagctactagcgcgcttataaaaatggatattctccgtcaacatcgctgtatttaaaacagcaccaccataggttctggtcaaaaagccttcatcttccagcttctcaagatcgcggcgaatggtttcttcggttacctgaaaaatcccactcaaattactgactgtcacctttttatcgttggcaaccatttgcttaattgcctgaatcctgtcttttgccgccacgattacacccctgtatctttttacatcacattagcgcgattatcgcataaccgatgtttactttcaaaataacctgtttgaatcacagattttcatcacagttttcacagaaacagaggtgaatcgtgttgagtatttaacgctccagggcctctgccatttccctcatcaatgttgcgtctgcatcgcttaagttgatattcagtgccgcgacattttcgcgtacctgttccggtgcagtagccccactaagaatggagattaaatcactctgttttaatatccacgccagtgccagagtgggaattgtgcactgataacgagcacaaagtggctgccactgttcaagcatatcaatcactttcagcatgttttcacgctggaaccagactttatttgcccgagcgccgcccggaacgtaatcacgagtgatggtgccggtcaacaatccctgctctagcggggaataaacctgaaccacaatgccattatcacgacatagtggcagcagttcgttttccattgcccggtcgaggatactgtatttcgcctgaataatatccagttcaccatattgcagatactcgcggatatggtcagcatcgacgttagcagcgcctatagcgcgaattttcccttcagactttaactcattaagcactgcgacagtttcagcgatcggcgtaaaaaatggcggcacgctctgccagtgcgtcatgtagatatcgatgtaatcaatacccagacgttgcaagctcgctgctacctcttcgcggatagattccggggaaaggtttttatacaactgccgatcgccaactttgttgaataaacttccttttcgttcccagacaatgccgcatttggtttctactacaacctgttcacggggcagtttttttaacgcctgaccgacgataacttcactattgccaaagttatatcctggcgcagtatcaatcagattaatgccacaacgatgggcttcaagaatcgtatcaatacatatttgccgatcgagatcgccattccatgcaggaccgccgccaatggcccatgtccccaaccccattcggctaagcgtaatatccgttgtgcctaaaggtatctttttcatttgccttcattatccttcgtattcttccagcaattgttcgaccagctttctgttttttacgccggtggtggcaccgacgcttagaacgctgatagccgccgttgcattggcaaagcgtgcgcattcacgcagatttttgccttctaacagtgccgcaataaaaccactagcaaagttatcgcccgcgccaatggtgtcgatggcggttattcctgcgaccgccggcaccttcatcgtcatgtcaccacgcttgataaagcagccgtctttacccgttttaatcaccaccgtttttacgccgcacgcaagaaagcagtcagcaatttcatccagtgtctctttcccggtgagtaattttgcctcggcaaaattaggaaacagataatcgacataactcaatgcttcgcaaatatcatccagcgtttcattcaaccgcggtttgatcatatcggcacagataatcatctgccgggctttagcttgcgtaaaaatttctgttagcgctttaccatccaatagtggactgttgaaaatactggccagacttaataatttcgcctgagaaaaccgcgcaaaatcaacatcgtcaatattcaatttccacagactgccattacggtttgtgacaaacgtccgctcgccatcctccgtcaccagtccaacgttaatagaggtatctatgctgacgtcctgcttcaggctttgaatatcaatattctctttgcggcaatggtcgagaataaattgccctgcggcatctttaccaatacgactcattaatgctgtgcgatggcccagacgagaaataattgttgcttcatttattgcatcacccccggtggtcattgcgattctttcaagaggataagaatccacatcaaagatatttttactgaccggttgcaatggaatatcaacaatagcggcacctatacaaataacgtcgagattatccatatcattattccgctttgccatcagaaccgaacagtttaattttttccaatgcccgttcttttacagctttacgtacttcacgttctaaatgcaggaaaggctgatcctggttttctttcactgcaaccattgcggcctgacagagctccgtatgaatgttgattttcgcgatacccaagctaattgcagttttaatgtcggcatcactgatcccgcttgcaccgtgcaaaaccagcggaacagaaacggcatcgcgtacgcgtttgacgacctcaaagttcaattgtggctcactcgtataaaccccatgctggttgccgatggcgacagccaaactatcacagcccgtacgttcaacaaattcagccgcctggtcaggatcggtatagtgatagcccgccagcgcttcctcataaacggtttcattaccgacatgccctaattccgcctctaccggaatacccagcggatggaagaaatcgacagcctctttggttaaacgaatattttcttcgaaatcaaacgcggaagcatcacgcattaaactattcataccatgagtccaggcgttatgaataatctccatactccgaccatgatcccaatgagttattaccggcaccgttgctttttgtgccatacttaccatcatgtgagagaaatcttcaaaactggtgttaccgacaaaacctgtaccaaaagaaataataaccggggatttcgcttcttcggctgcgtcgataacgcccatcaacatttctgcattccatacgttaaaatgggcaattgcataatgtttatttgtggcatcgttttcccaatatctgatatctgcgagcatgttctgttctcccgtattaattaatcgctaattttaataacgcctttaataatgtcgcgtttgttgttaacactctcttcaaatgcctgttgtacatcccgataatcgtaaatatgcgtcaccatgcttttcacatcgaatcgcccactagaaatagcttcaatcgtgaccggataacgattggcatagcggaataccgtctggatagtgacttcgcgattgattttgaggaaattgattgcgctatcgccgggtacagtaccaacaatcataattttaccgccgcgcattaccagataaggtgcctgtttaacggtgaccgcagaacccgctgtttcgaaaacaatatctgcgcccatgtcttcggtaaattgctgacagcgtgcaatagtgtcttcttttgcgccgttaataaccactgtcgcaccaagctgttccgccattgccagacgtttttccagcacatcaacgacggcaatttccgttgctcccaggcatttgcacgcttgcaacgtcatcaaaccaatacaacctgctcccagaataattatcttcttacccggtttaacatctgccagcatcgcggcatgcatcccgactgcggcaggctccaccagcgccccttccatcgtgtccatattgtcgggcagtttgtaagtaaagctctccggatgacacagatagtgcgttaatgcgccgcggtagttgggttgtgtcgccataaaatcaacgtccgggcagatgttatatttgccttccagacagtaacgacagtgaccgcaaggaacgccaggttcgatatttacccgatcccccggtttaaatttgcgcacgcggcttcccacagccacaaccgtcccggcgcattcatgacccaggccaatttcttgatttgggtctttaggcggaataaacgggccactttcaaaaccatgtacatcactaccacaaataccgacatattctactttaatcaaaacttcatcttctttaggcactggtatttctgcactaataattttcattgtgcccggcacctgcaatattgctttactatttttcattttgaatccacccgtattatttattggctactgcatcaatacttaaactttcaacggagacacctttggtttcgattccaatggtggcgatagcaattgcgacaataatactaaccgcccccagaagaataaagactcccgtaacgccataactactgagcagcactgcaacggcataaggtgcggcaataccactgattcgccctaccgcattcgccagaccggagccacggagtttggcctctgtcggccagatttcagggacatacactgcgctggcatagcaagcgtacatatagacgaaagtaatcaggaagaaaccaatcaacgttatgagcaacatactggtttgcagactatagatatatccgagcaccgcaatcaggattaatagccccacacccattgttttacgcggaattttatccatcaccagcatggcaataaaaataccaaatggcgcgccaaacatactcatggtatttaaaacaatgctgtcttttaaattaatcccctgggtcatgaatattgttggcaaccagttaattagtgtgtactgcacaacgttcatggcaatcagcacacaagagcctaatatcacgcgtttcagtaatactcctgtcagtaaggcactatacggcaccgcttgtggcgctttaccgtcatcagcaataaccacaggcggcaaaggtttacccgtctggcgtatgacgccttcttctatactccgcatgactttctcggcttcctgataccgtccgcggctttccagccagcgcggggattcaggaaagtagcgccaggccagcgccgtagcgataaggctcaatattgcagggataagcagttgtacccgccagttccactctgcactaatcagcggcgtgagtcccatcgctatcaaactacagagcggataactccagttgccaataaaggaaacccgactactccacgttccacgatttctaccgggcatatattcggtgaaaccagcaaacagcgtaaccagtaaagctcccagcccaactcccatcacaaaacggcaggcaataaggaaatccatattcggactgaaagcaccgacaaccatgctggcaatatgaatggcctcatagaggatgaacgcatttctgcgaccggttttgtcgccaatgatgccgcccaccagcgcaccgagaaacattccggcggtcgtgattgcactgaatgtggctgtggtggaattatctgtccagcccaacgctttcagctgcgcgaggatcaagccaccaacggcattactccagcagacaagcaagccaaacgcgacgatggcaaacatactactatgccagcggcaatccggtaagcgatccagccgtgcaccacaatgcggttttgttatctgttccatgcgataacgttccttcaggagagtggttattcatcaaagtcgtaagtcatgatcactttgattgcggttttatcgaccatcgcatcaaacccttcgcgccattggctcaggccgatacgatgcgtgatcatcggtttgactttgatagcgccgctggctaatagcctgatagcgttacgccaactggtggagtcataggccatatgcccaatgatgcttttgttccaggcggtaatgtcattaatgctgaaatcaagaggtttgaagcccattccaacgcgtaccacttccccgttcgggcggagcatttcgatggcttgtttcagtgcgatattggcaccggagcattcaatcaccagtcccagattgtctttgccacaaatttgctggcagcgcgccaccacatcttcggtagaaccatttactactgccgtcgcacccagttcttttgcaaccgggaagcggaccgccacatcttcttgcagaccaacgacgacgatatttaccgcccccataattcgcgccatttgtacggagaacagcccgagtgggccagtgccgatgacgaccacatcctgaccaggaaggaatttgctttgctgcgcgatggatttgtaggcattacagatagggtcaagtacggctgcgtcctcataatcaacaccatcagggatttcccacaacgcatgacgatgaattttgagaatttcaccaggaaccagacaatatttggaaaaaccaccgccccaggtattattatccagaccaaggtttactttttctgtacaacacagaaaatcaccttgttcacaggccggacaaacaccgcaaacgtgaccgctgttatcgcttacgacgcgttgccccactttccagtctttgactttttcaccaacctgcgcaatacaacctgcgaactcatggccgcggatagagttaaactcatcagaaccgctatcgacattgtagtgcttcatgtctgcgccgcagattgccgcggctttaatttcaatcactacatcttccgggccacacatgggttgtgggacatcaatcatcttgtagccgccaaaggccttgccaaaccgagccagtgctttcattgcgtcatcctctgtgtttagttttgcttagatggccatcatacttacccacatgatttttgaggtcaacattaaatctgtaaaacacagataatgatctgcgttttacaactcagatcacaattacgcagaaaatggctgggtctgttacaggttgatggaaggcggggcgcaaaaagagcaaattcgagagggattaccggccaaataggtctgagacttaagttcaggagaagtcattcaggtgtgaacgggacggcaagagatcggactgggacttagccaggtcatggcgagataattgagatgagtcgtggggtcattgttggctatccccttcatagccgaggcaaaaaggggatgaaccacttacttaaacatggcaataggctttgcactgataccaaaatcttcttttaactgctgtttgctcttcatgaccatctgaccatttgtgtcaattgtcatatgctgtgcttcgatattatggcgggcttgccacagcatcaccagttgcaggcagttctctttttgttcctcggtcaacgcaacgccatcaggccatttccccagttcaacggcggtgctcaaacgctggtatacctcaggcatcatgctgttgataatgtcatcaagattcataatttttccgctcctgtggaataagttgctgaatcgttttttcaaccgttgatttcttcgccgttttcgccatcggtaaagcgtaaagaggcagagttaacacaataacgttcgcccgttggctgcggcccgtcggggaagacatgccccagatgggcatcacagttaccgcaacgaatttctatgcgctgcattccatgactcaagtctttgatataacgaatggattcttcacttaccggttcgtagaaactgggccagccacagccggaatcatacttggtttgggaatgaaacagcggggcatcgcagatcaaacagtgatatacgccgtcacgcttgttatgcagtaaacgacccgtaaatggcggctctgtcccatgattctgcgtcacgtaaaactgcatctcggacaaattttttttcagttcttctgcgctaggtttattagccatttgctcacatctcactttaatcgtgctcacattacgtgactgattctaacaaaacattaacaccaactggcaaaattttgtcctaaacttgatctcgacgaaatggctgcacctaaatcgtgatgaaaatcacatttttatcgtaattgccctttaaaattcggggcgccgaccccatgtggtctcaagcccaaaggaagagtgaggcgagtcagtcgcgtaatgcttaggcacaggattgatttgtcgcaatgattgacacgattccgcttgacgctgcgtaaggtttttgtaattttacaggcaaccttttattcactaacaaatagctggtggaatatatgactatcaaagtaggtatcaacggttttggccgtatcggtcgcattgttttccgtgctgctcagaaacgttctgacatcgagatcgttgcaatcaacgacctgttagacgctgattacatggcatacatgctgaaatatgactccactcacggccgtttcgacggtaccgttgaagtgaaagacggtcatctgatcgttaacggtaaaaaaatccgtgttaccgctgaacgtgatccggctaacctgaaatgggacgaagttggtgttgacgttgtcgctgaagcaactggtctgttcctgactgacgaaactgctcgtaaacacatcaccgctggtgcgaagaaagtggttatgactggtccgtctaaagacaacactccgatgttcgttaaaggcgctaacttcgacaaatatgctggccaggacatcgtttccaacgcttcctgcaccaccaactgcctggctccgctggctaaagttatcaacgataacttcggcatcatcgaaggtctgatgaccaccgttcacgctactaccgctactcagaaaaccgttgatggcccgtctcacaaagactggcgcggcggccgcggcgcttcccagaacatcatcccgtcctctaccggtgctgctaaagctgtaggtaaagtactgccagaactgaatggcaaactgactggtatggcgttccgcgttccgaccccgaacgtatctgtagttgacctgaccgttcgtctggaaaaagctgcaacttacgagcagatcaaagctgccgttaaagctgctgctgaaggcgaaatgaaaggcgttctgggctacaccgaagatgacgtagtatctaccgatttcaacggcgaagtttgcacttccgtgttcgatgctaaagctggtatcgctctgaacgacaacttcgtgaaactggtatcctggtacgacaacgaaaccggttactccaacaaagttctggacctgatcgctcacatctccaaataagttgagatgacactgtgatctaaaaagagcgacttcggtcgctcttttttttacctgataaaatgaagttaaaggactgcgtcatgattaagaaaatttttgcccttccggtcatcgaacaaatctcccctgtcctctcccgtcgtaaactggatgaactggacctcattgtggtcgatcatccccaggtaaaagcctcttttgcattacagggcgcacaccttctcagctggaaacctgcgggtgaagaagaagttctgtggttgagcaacaacacaccgttcaaaaatggcgtcgctattcgcggtggcgtaccggtttgctggccgtggtttggtccggcggcacaacaaggtctgcctgcgcacggttttgcccgcaacctgccgtggacgctgaaaagtcatcatgaagatgctgatggcgtagcgctgacttttgaattgacgcaaagcgaagagacgaaaaaattctggccgcacgactttacgctgttagcgcatttccgcgtgggtaaaacttgtgaaatcgatcttgaaagtcatggcgaatttgaaaccacctctgccctgcatacctactttaacgtgggtgatatcgctaaggtaagcgtcagtgggctgggcgatcgcttcattgataaagtgaatgacgcgaaagaaaatgtactgaccgatggtattcagaccttccctgaccgtaccgatcgcgtgtatctgaatccacaagattgcagcgtgattaatgatgaagcgctgaatcgtattatcgccgtaggccaccagcatcatctgaacgttgtcggctggaacccgggaccggcgcttagtattagcatgggcgatatgccggatgatggctacaaaacatttgtttgtgtagaaacggcttacgctagtgaaacgcaaaaagtgaccaaagagaaacctgcacatctggcgcaatccattcgcgttgcgaaacgttaatttacgttaatgttgtgtgccgggtgcaatgcatccggcacacaacatcacaccatatccagcgcagtttttccttttggtgccggatatgccttatccagcatagctaattccgcactagaaagttcgacctcaagcacagccgcattttgttggacatgggcaatcgtggccgcttttggaatcgccatcacaccctgatgactgatcacccacgccaacaatacttgtgccgcgctgatattgtgagcatgtgcaatttcgttgactaccgcgttttttaacagtccattgcgcaaccgcccggcctgggctaacggactgtaagccatcaccggcatctgctgttgctggcaccaggggagtagatcgtactcaattcctcgactaccgagatggtaaagcacctgattagtggcacactgatttccccccggcagctgccagagttcctgcatatcagcataatcaaggttagaaacgccccagcggcggatttttccctgggcgatcaatttttccatcgctgcgacagtctcttcaaaagcgaaactgccagaccagtgtaataagtaaagatcgagataatcagtattgagacggcgtaaactggcttcgcatgcatttatcgctttttgcccgccagcattccacggatagactttagagacgagaaagaccttctctcgcagaccggttaatgcttccccaaccaccttttcggcaccgccatcggcatacatttcggcggtatcaatgagggttaaaccgagttcaatgcccgcgcgtagtgcagcaacttctgttttgcgctgactggcatcttcgcccatataccatgttccctgccctacggctggcagactgacatcgccactaaattgaatcattttttgttgcattgtttcctcccaggtattgcaccaccgtaatgcaaaacagggcgtgacgccctgtttttatgcacaaaatgccctggaaagatgcattatcagaatttgtaggtgatcccggtagaaatcaggccagtccaggatttatccaccatcgggctgtcagtaacttcatcagacagacgggtgtagcgtgcggtaccgtaaacactccagtcgccgaggaagttgtagctggcgctcagctccaggtaagggctccagctgtcgttcgggttatagccacgcagaccgctgcgagcggactctttgcggcttacgccataatagtattcgttctggttttcgctgttccactgcacaccaatacccggagtcacggtcaggccaccgttggtgtaacgatacaaccaggccatatcccagacgatgccgttgctgttatccagggtatcgccagccagggtggtacgcaggtaaccgtactgggtaaagtgagcataagacagaccagccatcatggtgctcttacggtcatccaggtgacgcatttggtgatcgccactgtctttcgctttgaagtaaagcgggctccagtaagcggtaatactaagtttatccgttgcgtcattccacaggtagtaaccaccacctaagccacggaaccagaagttatcgccttcatagttgattaccggtactgggtaaacatcggtatcgtaatctttatatgggtgttcaacgacacctacgcctgcgcccagggaaaatttaccttcagcgtgcgctacgcctgcagacgttgcgataagcactccaagtgccagaagtttgagtttggtcacaattaatcattccttaaacaaatgtttagcgggcgacaaagtttacccgtcaatacatcgaaacccaacctttttacgttttcattttttaaagtaactgtttaattttcctgacgcggatgacaccgcgcttacagccaaatgaatttagcgttactggcgagcctggtctttacattaattatgcaaaatttatggatgagttgttgatatgccattgaaattaagaaagccgtgcaggcaagttttccatttgccatctacgcttaattttgaaggtgtatcaccgggcacgttgttctcatcgtcgataaaatggcatgagagttgctgtgttttagcaagagacgtcgttcagtttacctcttccgggagcctctactattcatatgaacggctcttaacctgtgctaaaaaacgaaaggacggcataccatgaatatattcgatcactatcgccagcgatatgaagctgccaaggacgaagagttcacactgcaggagtttcttaccacttgtcggcaagatcgcagtgcttatgccaacgcggctgagcggctattgatggctatcggtgagcctgtcatggtcgatacagcccaggaacccagactttctcgactcttttctaaccgggtcattgcacgttatccggcgtttgaagagttttacggcatggaagacgcgattgaacagattgtctcttatctgaaacacgcggctcaggggctggaagagaagaaacaaatcctgtatctgctggggcctgtgggtgggggtaaaagtagccttgctgagcgactgaaaagtttaatgcagctcgtaccgatttatgtattgagcgcgaacggtgagcgtagcccggtcaacgatcatccgttctgtcttttcaatccgcaggaagatgcgcagattctggaaaaagagtatggcattcctcgccgttatctcggcaccatcatgagcccgtgggcggcaaaacgcctgcatgaatttggtggcgatatcactaagttccgggtagtgaaggtctggccgagtattctgcaacaaattgctatcgccaaaacggaacccggcgatgagaacaaccaggacatctccgcgctggttgggaaagtcgatattcgtaaactcgaacactacgcgcagaatgacccggacgcctacggctattccggtgcgctgtgccgcgccaatcaggggatcatggaattcgttgagatgtttaaagcaccgattaaagtgctgcatcccttgttaaccgccactcaggaaggtaactacaacgggacggaaggtatctccgccctgccgttcaacgggattattctcgcacacagcaacgagtccgaatgggtcactttccgtaataacaaaaacaacgaagccttcctcgatcgtgtttacatcgtgaaggtgccgtattgcttgcgcatttccgaagagatcaaaatctacgagaaattgcttaatcacagtgaattgactcacgccccatgcgcccctggcacgctcgaaacactgagtcgtttttccattcttagccgcctgaaagagccagaaaactccagcatttatagtaagatgcgggtttatgatggcgaaagtctgaaagacaccgatcccaaagccaagagctatcaggaatatcgtgactacgccggtgtcgatgaagggatgaacggtctgagcacgcgttttgcgtttaagatcctctcccgcgtgttcaacttcgatcatgtagaagtggcagcaaacccggtccatctgttctacgtcctggaacagcagattgagcgcgagcagttcccacaagagcaggcagaacgctatctggagttcctgaaaggttatctgatcccgaaatatgccgagtttatcggcaaagagatccagacggcctaccttgaatcctattccgaatatgggcaaaacattttcgaccgttatgttacctacgcggatttctggattcaggatcaggagtatcgcgatccggataccgggcagctgtttgaccgcgagtctcttaacgccgagctggagaaaatcgagaaaccggcggggatcagtaatccaaaagatttccgcaacgagattgttaacttcgtactgcgcgccagagcgaataacagcggacgcaatccgaactggaccagctatgaaaaactgcgcacggtcatcgagaagaaaatgttctccaataccgaggagctgttgccggttatcagctttaacgccaaaacgagtaccgacgagcagaagaaacacgacgactttgtcgaccgtatgatggaaaaaggctacacccgtaaacaggtgcgtttactgtgcgaatggtatttgcgcgtacgtaaaagctcttaacaaccctggcccggtacacatgttaccgggcctacaacgacagcgaaccgtgggcctgagaagcggcaacacaggcgtagcatacagttggcaaatgtagtacggggggcatatgacctggtttattgaccggcgtctgaacggcaaaaacaaaagcatggtgaatcgccagcgttttttacgccgttataaagcgcaaattaaacagagcatctccgaggccattaataagcgtagcgtgactgacgtcgacagcggcgaatccgtatccattcccacggaagatattagcgaaccgatgtttcatcaggggcgtggcggtctgcgccaccgcgtgcatccgggcaatgaccatttcgtccagaacgaccgaattgaacgtccccagggtggcggcggaggttccggcagtggtcagggccaggccagccaggatggtgaaggtcaggatgaatttgtctttcagattagcaaagatgagtatcttgatctgctctttgaagatttggccttaccgaatctgaaacaaaaccaacaacgccagctgaccgaatataaaacgcatcgggcgggttataccgctaacggcgttccggccaatatcagcgttgtgcgtagtttgcagaacagtctggcgcgacgcacagccatgacggcaggcaagcggcgggaacttcatgcactggaagagaatttggccatcatcagcaacagtgaacctgcgcaactgctggaagaggaacgtctgcgcaaagaaattgcagaattacgtgccaaaattgaacgcgtcccttttattgacaccttcgatttacgttacaagaactacgagaagcggcccgatccctccagccaggcagtgatgttttgcctgatggacgtttccggtagtatggatcaatccactaaagatatggctaagcgtttttatattctgctgtatctgttcctcagcagaacgtataagaacgtggaagtcgtatacatccgccatcatacccaggcgaaagaagtcgatgaacatgagtttttctacagccaggaaacaggcggcaccattgtttccagcgccctgaaactgatggatgaggtagtgaaagagcgttataacccggcacagtggaatatttacgctgcacaagcaagcgacggcgataactgggccgatgactctccgctttgccatgaaatcctggcgaaaaaattattacctgttgttcgttattacagctatatcgaaattacccgtcgtgcacatcagacattgtggcgagaatatgagcatctgcaatctactttcgacaactttgcgatgcagcacatccgcgaccaggatgatatttatccggtgttccgtgaactgtttcataaacaaaatgcaacagctaaaggctaaaactatcagccaggtcattatcgcctggctgatttttagcttactgtaaattatctcatttattacatacattagcttacaatcgctttaaatatgacagcataacctttacataatttagttccagaaaacaatcattcggaaaaatgattcagagtacacgtatttccatggggttattctttaaatattttttaagcttaacgaaaattgatcctggtcaaaactatatatctctgccaagtataaaatccagcactcacattgctctcctttttatggtttctatgggtacacaaaaattaaaagctcaaagcttttttattttcagtttattgctgacgttaattttattttgcattactaccttatataacgaaaacacaaatgtaaaactcatcccacagatgaattacctgatggttgttgtggctttgtttttccttaacgccgtcatttttcttttcatgttaatgaaatatttcactaacaaacaaattttaccaacactcattttaagccttgcatttttaagtggccttatctatttagttgaaaccattgtaattatccataaaccaattaacggcagtacactgatccagacaaagagcaatgatgtttctattttctatattttccgccaactcagttttatttgtttaaccagcctggcgctcttttgttatggaaaagacaacatccttgacaacaataagaaaaaaacgggaatcctgttgctggcgctgatcccttttttagtttttccccttctggcacacaatctgagcagttataacgctgactattctttgtatgtcgtcgattactgtccggacaaccatactgcgacctggggaatcaactatacaaaaatattggtttgtctgtgggcatttttactgttctttattatcatgcgcacacgattagccagcgaactatggccgttaatagcattattatgtctggcaagcctatgctgcaacttacttctactgactctggatgagtataattatactatctggtatatcagtcgcgggattgaagtttccagtaaactgtttgttgtgtcttttctgatttataacattttcaggagctgcaactctccagcaaactggcagttcatgatgtgctgaccaatatttataatcggcgctactttttcaacagcgtagagagtttattgagccgacctgttgttaaggacttctgtgtcatgctggttgatattaatcagttcaaacgcatcaatgcccaatggggacatcgtgtgggtgataaagtgctggttagtattgtcgatattatccagcaaagcatccgccccgatgatattttagcgcgactggagggtgaggtgtttggcttgctatttaccgaactcaatagtgcccaggcaaaaatcattgcggaacgtatgcgtaaaaatgtcgaactcctgaccggctttagtaacagatatgatgttcctgaacaaatgaccatcagtattggcacggtttttagtacgggtgacacgcgtaatatcagccttgtcatgacggaagcagataaagccttacgcgaagcgaaaagcgaggggggcaacaaagtgattattcatcatatttaagtgcaaaaatattcagagccatgctttttgcgtggcttttgcatacaatttattactattacccctaaatttcccctccccagcggcgcagagatgagtataattagcgcccctgtgccaggccgcaatcgaactttatctggttttctcgtttcactaaccgaaggagatgcgtataaagcttccgatgagcgtttatatgtcaataagcagaacaaaaacagccgttcatgataaccttctgtggttgtttgcttgtaatctcaggagcgtgaaatgactgaaatggctaaaggaagcgtgacgcatcagcggttaatcgctttattaagtcaagaaggtgctgacttccgcgtcgttacccatgaagcggtaggtaaatgtgaagcggtgagtgaaattcgtggcaccgctctaggccagggtgctaaggcactggtatgtaaagtcaaaggcaatggcgtaaatcaacatgttctggcgatcctcgcagccgatcaacaggccgatctgagccaactcgccagccatataggcggattacgcgctagcttggccagcccggcggaagtcgatgaactcacaggctgtgtcttcggcgcgatcccccctttcagcttccatccaaaactcaaactggttgccgaccctctactcttcgaacgatttgatgaaatcgccttcaatgcaggcatgctggataaatccgttattttgaaaaccgcggattatttgcgcattgcgcaaccagaactggtcaatttccgccgcactgcgtaattagccggtccgttcgataagaagaacggacaaaaccagtacaacagcaatggcaaaaaagctactcgtgataatcagtgtctcgacaaacatttgatcgttcatagcatgcccccgggagatagctgttttcacgttattgttagcgtgcacaaatggcagtttgatgacagttcgcctgattttttatgcaaaaaacgtaaagattttctacttccttcctgcagcaagcgtaaagtaagcaggcttattattttttggcaaggaaaccacgatgtttgatgtcactttgctgatcctgctcgggttagctgcgctgggctttatcagtcataacaccactgtcgccgttagtattctggtgttaatcattgtccgcgtcacaccgttaagcaccttttttccgtggattgaaaaacaggggctaagtatcgggataatcattctgacgattggcgttatggcccccatcgccagcgggacgctaccgcccagtaccttgattcacagctttctgaactggaaaagtctggtggcgattgcagtaggcgtgattgtctcctggctgggtgggcgcggcgtgacgttaatgggcagccagccgcaactggtcgccgggctgctggtaggcactgttttaggcgtagcgctgtttcgcggcgtaccggttgggccgcttattgccgcgggtctggttagcctgattgtggggaaacagtaattattgccgcgggtctggtttcgcactttgtggggaaacagtagttaatctcgcaatatatcggcctggcgtttgccccaggcctttcttaaacatagtaataaaggccgttgtactatcataccccagcgtatgagcaactttctgtacagtatcgcctttcactaatccctgaagcgccataatcagctgtaactgctgacgccactggcgaaaactcaaccccgtctcttttactatcagtcgggcaagattgcgttcactcatcgcaaaaaagccagcccattgccccaatgccccccactcgacaggccctttcgccatcatctccaccatcgtgcggattttaggatgagaagaaacgggcaggtgcagctgttgttgtggctgctgagggagttcatcaaacaggacctgaattaatctgcgggtcattggctcagcacgctgagtcgtcgtcctgtttgccagggttaaaattaattcccggcataaggggcttattttcaatgtgcaacatgttgtcggcattgtcactgcgctgggttcgataaacagaaaacagagttcagcattagctgttacttgattgctatgttccaccccgcccggtatccaaaccgcatattgtggcggcaccatccacaaagcattttccaccgtacaggtaattgcaccatgtagcgccagtatcagctgtcctttgcggtgctgatgtacaggactggttaactcatccgttccggcgtgaatacaaaatgcgaccgcggcttcatggtgtcggtcgggttcatagccattgagattcaacctgtgcatcattttgtccgaacttagcgataatttgtcattttagcttgattcaacataacaataaaaacggtaaggtacagcctcgtttgtaacaatgagaagcatatgacctgtagtactagtttaagcggcaaaaacaggattgtccttatcgctggcattctgatgattgccacaacattacgcgtcacctttaccggcgcagcaccgttactggatacgattcgttccgcttacagcctgacgacagcgcaaaccggcttattgaccaccctgccattattggcctttgcgctaatcagtcctttggctgccccggtagcgcgacgttttggtatggaacgtagcctgtttgccgcgttacttttgatctgtgctggtatcgcaattcgctctctccctagcccttacttattatttggcggtacagcggtcattggcggtgggattgcattaggcaatgtcttactgccaggattaattaaacgcgatttccctcattccgtcgccagacttaccggcgcatattccctgacaatgggagctgcagcggcactgggaagcgctatggtcgtgccgctggctttgaacggttttggctggcaaggcgcgttgctcatgctgatgtgttttcctctgctggctctttttttatggctgccacagtggcgaagtcaacaacatgcaaatttgagtaccagccgcgccttacatactcggggtatctggcgtagtccgcttgcctggcaggtcacattgtttcttgggatcaacagtctggtctattacgtgattattggctggcttccggcgatcctcatcagtcacggctatagcgaagcacaggcgggtagtctgcatggtttgctgcaactagccacagcagcacccggtttgctgatcccacttttcttacatcatgtgaaagatcagcgtggtattgcagcgttcgttgccttgatgtgcgcagtgggcgcggttgggctctgctttatgccagcgcacgcgatcacctggactctgcttttcggttttggttccggcgcaacaatgatactggggttgacgttcattggtctgcgggctagttctgcgcatcaggcggcggcactcagcgggatggcacaatccgtcgggtatttgttggcagcctgtgggccgccgctgatgggtaaaatacacgatgctaacggtaactggtctgtaccacttatgggtgttgccatacttagtctactgatggcgattttcggactttgcgccgggagagacaaagaaattcgctaatatccggtgctatagtgacgtaacaaatcatgcgtgaaagggagaacaaacacgatgaatattcagtgcaaacgcgtttatgatccggctgaacagagcgatggttatcgcatactggtcgaccgcctctggccgcgcggtatcaaaaaaaccgatttagcccttgatgagtgggataaagaaatcacgccgagtacggaactgcgcaaagcctttcacggcgaagtcgtcgattatgcaacctttcgcgagcaatatcttgcagaactggcgcaacacgagcaagaaggaaagcggctggcggacatcgccaaaaaacagccgctgaccctgctctacagtgcaaaaaacaccacgcagaaccatgcgctggtgctggccgactggctacgtagcttgtgattttagtacagcatccggcggttatttttcaccagccggatggtcacgccgccacaatgcccattcatcaatcgtttcaccgcccggtaatttgcaattgttgctgaccccttgcgctgtctgcactggaatgagcgtcccgcccttctgctggcaatagacgctcgccggatttgccataccaatctgcggcggtttaggtgcttctggctgagaaggggtactacaaccagccaggaccagcaagcaaggcagaacaaaactgataattttcatttattgatctcacatatttatccaagattagagtatcgcggtatcgttttgttttgcagcactatttttattacattcactcaaaacatattacgtcttgtttcatctttgttgatgatgttttatcatgcctgcaaagattaaataatcagcatttacccgccgtatcctggagttgttccgtgagtgatcagattatcgcccgcgtcagccaatcccttgccaaagaacagagtctggaaagtctggtccgacagcttctggagatgctggaaatggtcactgatatggaaagtacctacctgaccaaagtggatgtcgaagcgcgcctgcagcatattatgtttgcccgtaacagccagaaaatgtacatcccggagaattttaccgtcagctgggattacagcttatgcaaacgcgccattgatgaaaactgctttttcagcgatgaagtccccgaccgttggggtgactgtattgcggcacgcaatcttggcatcaccacatttctgagcacgccaattcacttaccggatggaagtttctatggcacgctttgcgccgccagcagtgagaagcgccagtggagtgaacgcgcggaacaggttttacagttattcgccggactgattgcacaatatattcaaaaagaggcactggttgaacagctgcgcgaagccaatgctgcgctgattgcgcaaagctataccgacagcttaaccgggctaccgaatcggcgggcgatttttgaaaatctgacgacactgttttccctcgcccggcatcttaaccataagataatgatcgcgtttatcgatctggataacttcaaattaatcaatgatcgttttggtcataatagtggcgatctgtttctcattcaggttggcgagcgccttaatacgctccagcaaaatggcgaagttattggtcgtctcggcggtgatgagtttttagttgttagtctaaacaacgagaatgcggatattagcagcctgcgagaacgcattcagcagcaaatacgtggagaatatcacttaggtgatgttgatttgtattatcccggtgccagtcttggcatagtagaagtcgatcctgaaacaaccgatgcagacagtgccctgcatgctgccgatattgcgatgtatcaggagaaaaaacacaaacagaaaacaccttttgtcgcgcatccagcgctacattcctgaggcgtattcacatccttttgattggtgataacatgcgaatcggtattatttttccggttgtaatcttcattacagcggtcgtatttttagcatggttttttattggcggctatgctgccccgggagcataaagatgaaaaaaacaacgattattatgatgggtgtggcgattattgtcgtactcggcactgagctgggatggtggtaacgtcacctctaaaaaatagcaaaggctgcctgtgtgcagcctttgtgcaatttaagcgttaacttttaatcttcctgtagataaatagcacgacaatcgcaccaataacggcaaccacgaagctgccaaaattgaagccatcgactttaccaaagccaaacagcgtgctgatccatccgccgactacggcaccgactatccccagcaggatagtcataaagaatccacctccatctttacctggcatgatccacttcgccagaataccggcaataagcccaaaaataatccaactcagaatgcccattgtttcctcacttatctgttttgcattagcgggttagtcgctgataaaaagcatagcacaacatcgggagggcaagatttgtgacgagcatcacggaggttttttttgcgatggcgcagaaattgcgccatcaacgatcagtgataattaccaaccacaaacatcatgttcgttttccgtgtcataagaacgtacggtattcaccagatcttttatcacttcagccgccacttctggcaccagcaaagtcatcggcgtctctgtttcataatcgacagaaacgccattgctgttattggtgacggtcacggtatacgttgctttgcccatgattcatttcccgttatgaatgactttccgttgttgcgcaccttccatcaggacttcaggagccacgaagaagtcaatgttgaaataagtatcgtcagtcatggcttcaatgttgtgccacttttctggagggaacaccgcaaactgccccgcttcgataaggatcacctgatcaggctctgcactgtgttcatcagcgtagccgagatatttgaccgccccatgcataacggaaaggcgtgggtaaacccccgggcgcgttcctttatcaagatgacgttcgaatattccggcaggtgcagtttgtttattccagaaaggcgtactgcgcgtatgaatataattctgtgggatttgaagcatccttttccctccttcggtgaatgcgctgaaaacggtttattccagccgtttcagggtacgcctgataatttgcattttaaataccatttattggttactttttagcaccatatcagcgaagaatcagggaggattatagatgggaagcccgcgacaacgcgggctgaaagcatcaggattgcagcgtcgccagtcgggcagcgaaacccacgaacatcaaaccaatcagactgttgccaactttagccagtttctttttggtacgtatgtactgcgtgacaaaagcaccagatataatcaggaagctcaaatagcagaaactcaccagttccagcgtcgccgccagaataaagaaactaattcccgtatgtggggcattaacatcgataaactgtacgaaaaagctcacatagaacaaaatggctttcggattagtcaggctcaaaattaacgcgcgtttaaaaatagcaccgtattggggctcatcggatttggcctcgctatttttacccttcagggtcgcgtaaagaattttactccccagatagagcaaataaaacgcaccaagataacgtacaatgttgaataatatcggggtggtcttaattaatgtcgccactccagcccatgccagaaacatcaataccgcatcgccaataaatacaccgcaggccgcaagataaccgcctttcataccgctactgacgctatttttgagtacaaacagggtatttggccctggcaccaacacaataaaaatggccccaaccagataggtccagtaattcagaaccccgtattcagcgaacacattaacctctttaattatctttcgatcatgcgcgattaaaggtgaatatgctaaccaatctgtagcggcttagaaaggagaaaatcaggttttaacctgatatcaacccgataattgaatcattaatcaggcatgctccagactaaaattcgggtagtgctcggcaaaatactggcgtaaaaattctaccgttatccgcactttcgcactcgtcgccagcctactaacataaacggcccagacgttcgctggctggtaatattccggtagcacttgcactaaatgaccactggcaatgttttcgctaacatcccaccaggaacgcagagcaatcccctgcccatcgagacaccactgatggacaatttctccatgattagagctcagtgggccggtgactttaatcgcatgggggccttctttattgcgtaattgccagacaccaaaaggatgatcgcgctctttaatgaccaggcacggcaatgcagaaagatcggttaaatgtttcggcgcgccatgttgcgcaataaattccgggctcgcgcagagaatacggtaattggtcgccagtttgcgggcgattaaattaggggcgatgtcatcgccaatgcgaatatcgagatcgacaccttcattgaccaaatcgaccagtcggtcttccacatcaaaacgtaattccagttgcggatacgccttcgccagcgctaataacgccggagccaccacctgtcgtccaaaaccaaagctgctgataatacgcagcatcccctgcggcacctgacgcacgtcagaaagttcgtccatcatctgaccgacatcctgcaaaatccgctgcgcccattcataaatccgctctccttcttcggtaatggtgacgcggcgggtggtgcggtgtaacaacaccacgtttagcgtttgctccagcaaggcgatgcgcttgctgacgaacgccggactaacgcccagttcttccgccacggcggcaaaaccagcccggcgagccaccagcataaagacgcgcaaatcattcagcagcggtaaattattcatgattcgtgttttatgtttcaccagttacggggattaattccttttcagtcaattataggatggtgatgttgtcaattttgatggtcaggaagtgagaacccaatgatgaaaacgatgcgtattgctgcgatcccgggagacgggattggcaaagaagtccttcctgaagggattcgcgtgttacaggctgccgctgagcgctggggcttcgccttgagttttgagcaaatggagtgggcgagctgcgagtattacagccatcacggtaaaatgatgccggacgactggcatgagcaacttagccgtttcgacgccatctattttggtgccgtcggctggccggataccgttccggaccatattagcttgtggggtagcctgctgaaatttcgtcgtgaattcgaccagtacgtcaacctgcgcccggttcgtctctttcctggcgttccctgcccgctggcgggaaaacagcctggcgacatcgatttttacgtggtcagggaaaacaccgaaggcgaatattccagcctcggcggtagagtgaatgaaggtacagagcatgaagtcgtcattcaggaaagcgtatttacccgccgtggtgtcgatcgcattttgcgttatgccttcgaacttgcgcaaagccgtccacgtaagacactaacttctgccactaaaagcaacggtttagccatcagcatgccgtactgggatgagcgagtggaagcaatggccgagaattacccggagatccgctgggacaagcagcatattgatattctctgcgcgcgttttgtgatgcagccggaacgattcgatgtggtggtggcgtccaatttgtttggcgatatcctttccgatcttggcccggcctgcaccggcaccattggcattgccccatccgccaacctgaatccggaacgcactttcccgagcctcttcgagcctgtccacggttccgcgccggatatctacgggaaaaatattgctaaccctatcgccacgatttgggccggggcaatgatgctcgattttctcggcaatggcgatgagcgtttccagcaagcgcataacggtattctggcagcaattgaagaagtgattgctcacgggccgaaaacacctgatatgaaaggcaatgccaccacgccacaggttgccgacgcgatttgcaaaattattttgcgttaaggtcaaaccagtttatttgaaccgcgtcactgacgcggtttttttattcgttctttgcagtaaataacctgcgtcatttcaccttttattgtttccgtttcgtgttttatggctttccgtattcttaattgtttaatttatgtaacatgcaaattttgttacgcgtacgttaggttccgccgtacaggtattggttttgctggcaatgggactggtgatttatttagccaccagtaaatacggcaatattcgtcttggcgaaggaaaaccggaatacagcacgctctcctggctgtttatgtttatttgtgccggtttaggttcttctacgctttattggggggttgctgaatgggcctattattatcaaacacctggattaaatatcgcaccgcgtagtcaacaggcactcgaatttagcgttccctactctttcttccactggggcatcagcgcctgggcaacttatacgctggccagtttaatcatggcttatcactttcatgtgcggaaaaacaaaggtctgagcctttccggcattattgctgctattaccggcgttcgcccgcaaggcccatggggaaaactggtcgatttgatgttcctgatcgccactgtcggcgcactgaccatttcccttgttgttaccgcagcaacctttacccgtgggctttccgcgctgaccggtttacccgataacttcaccgtgcaggcatttgtgatcctgctttccggcggcattttttgcctaagcagctggattggtatcaacaacggtttgcaacgtctgagcaaaatggttggctggggcgcgttcctgctgccattactggtgctgattgtcggcccaaccgaatttattaccaacagcatcatcaatgccatcggcctgaccacgcaaaacttcctgcaaatgagcttattcaccgatccgcttggcgatggtagttttacccgcaactggaccgttttctactggctgtggtggatcagttacacccctggcgtagcaatgtttgtcacccgcgtttcccgcggtcgtaagattaaagaagttatctggggactgatcctcggcagcaccgtcggttgctggttcttctttggcgtaatggaaagctatgccattcatcagtttatcaatggcgtaatcaacgtcccacaggtgctggaaacactgggcggcgaaacagctgtacagcaagttctgatgagcttgccagccggtaaattgttcctcgccgcatacctgggcgtgatgattattttccttgccagccatatggatgcagtggcctacaccatggcggcgaccagtacgcgtaatctccaggaaggtgacgatcctgaccgtgggctgcgtcttttctggtgcgtggtgatcactctgatcccgctttccatcttgtttaccggtgctagcctggaaacgatgaaaaccaccgtcgtgctcacagcccttcccttcctcgtcattttactggtgaaagtcggcgggtttattcgctggctgaaacaggattacgccgacattccggctcatcaagttgaacattatctcccgcagacaccggttgaagccctggaaaaaacgccagtgctccctgcgggaaccgtattcaaaggcgacaactgagcgccatcatcctaacgataaaggtatccctatgagcaatctgagccctgactttgtactacccgaaaatttttgcgctaacccgcaagaggcgtggaccattcctgcccgtttttataccgatcagaacgcgtttgaacacgaaaaagagaacgtcttcgccaaaagctggatttgcgtcgctcacagcagcgaactggcgaatgccaatgattatgtgacgcgtgagatcattggcgaaagcatcgtgctggtacgcggtcgtgataaggttttgcgcgcgttctataacgtgtgtccgcaccgtggtcatcagttgttgagcggtgaaggaaaagcaaaaaatgtgattacctgcccgtatcacgcatgggcattcaaactcgatggcaacctggcccatgcacgtaactgcgaaaacgtcgccaatttcgatagcgacaaagcgcaactggttccggtgcgtctggaagaatatgccggattcgtcttcatcaacatggaccccaacgccaccagcgtagaagatcaattacccggcctgggcgcgaaagtgctggaagcctgcccggaagtccacgatctgaaactggcggcccgctttaccacccgcacgcctgccaactggaagaacattgtcgataactatctcgagtgctatcactgtggtccggcgcatccaggtttctccgactccgtacaggttgatcgttactggcacaccatgcacggtaactggacgctgcaatacggtttcgccaaaccgtccgaacagagctttaaatttgaagagggtacggatgcggcattccacggtttctggctgtggccgtgcacgatgctgaacgtcaccccgatcaaagggatgatgacggtcatttatgaattcccggtggattctgaaactaccctgcaaaactacgatatttacttcaccaatgaagagttaaccgacgagcaaaaaagcctgattgagtggtatcgcgatgtgttccgtccggaagatttacgtctggttgaaagcgtacagaaagggctgaaaagccgtggctatcgtggtcaggggcgcatcatggccgacagtagcggtagtggcatttccgaacatggtatcgcccatttccataatctgctggcgcaggtgtttaaggactaatgacatcggcggcggtattttccgccgctgggctgatttttgatggagtacagcaatgagtgactatcaaatgtttgaagtacaggtgagccaggttgaaccccttaccgaacaggtgaaacgcttcacgctggtggcaaccgatggcaaaccattacctgcgtttaccggaggaagtcacgtcattgtgcagatgagcgatggtgataaccagtacagcaatgcgtatagtctactgagtagcccgcatgacacctcttgttatcagattgccgttcggctggaggaaaacagccgcggcggttcccgctttttgcatcagcaggtaaaagtgggcgatcggttaacgattagtacgcctaataacctgtttgcgctaattcccagtgccagaaagcatctgtttatcgcgggcggtattggtatcacccctttcctgagccacatggcagagctgcaacacagcgacgtcgactggcagctacattactgcagccgaaatccagaaagttgcgcatttcgtgatgagctagtccagcatccgcaggctgagaaagtccatttgcatcatagtagtaccggaacacgactggaattagcgcgattattggcggatatcgaacctggcacacacgtttatacctgtggccccgaggcgctaattgaagcggtaagaagtgaagctgcgcgtctggacatcgccgccgatacgctgcactttgagcaatttgctatcgaagacaaaaccggcgatgcatttaccctggtgcttgcccgttccggaaaagagtttgtggtgccggaagagatgactattttgcaggttattgaaaataataaagccgcgaaagtggaatgtttatgtcgtgaaggggtatgcggaacctgcgaaacagcaatactggaaggtgaagctgaccatcgggatcaatattttagcgatgaagagcgtgccagccagcaaagtatgttgatctgttgtagccgtgcgaagggtaaacgcctggtgttggatttgtaatttgccgaagccggatgtggcgctgagcgcgcccagtccggcttcggaagattttactgcggatattcctgcaataaattgtgtaatgcttccgccatcagctcaccacgccagccggaaatcagctccggcaaattgttctgcggtttcagtttccagtgccagttcagcagttggttgatttgccgacggcttgccagcaattcggcgctgatcttatgcgtttcgctcacgtcagtaatcaggctcttaatcgctttaaacgctttacgataacccggcatgtccatcaggttaagcatcggctgcggtaaggcatcttccggcaatgtctgcgctttttccaccagcgctagcagcgttttaccgtgaaagcggatttcgctaccggataaacccaggctgtccagttcgcctaaacttcccggcatataacgcgctacgctccacaaatgctcttcacgcacgacaaagttcaccgccagatcgcgctctcgcgccttgcgcagtcgccagtcggctaacagttgcagacaggccagttggcgtgtgcgtaattgccaggcattggtgatatcacgccaggcatcttccggcgcaacgacttcctgacgacgcatttgcatcaggcggcattcatccagcgccgcaggtagccagccggaggcctccgtttctaccataagcttggcggtgatcggtaacagataccagacatccgccgctgcgtattcacactgacgttcggtcagcggtctggccagccagtcggtgcggctttcactcttgtccagcgtaacgccggaatactcttccaccatggaagcgaaaccccaactcatcgggcgtccgcagaaggcagcaaggatttgcgtgtcaatcaagggttgtggtaattcgccaaagacattgaggaacacttccagatcttcactgcctgcatggagaaattttgtgatggacggatcgcgcaggatcgctttcagcggactccagtcggtgatcccgagtggatcgattagcgccagatgctcgccatcgaaaagttgaatcaaccccagctgcgggtaataagtgcgcgtacgaacaaattcagtatccagggctatcgccggaaaggcacggacggcttcacacaaagaagccagcgcatcgtccgtggtaatcatttggtaattcaaattgttttctctttagtgggcgtcaaaaaaaacgccggattaaccggcgtctgacgactgacttaacgctcaggctttattgtccactttgccgcgcgcttcgtcacgtaattctcgtcgcaaaatttttccgacgttagatttcggtaactcatcacgaaactccaccagcttcggtactttgtatcccgtgagctgacggcggcaaaaagtcaccagactctcttcggtaaggcttggatcttttttcactacgaagattttcaccgcttcaccactggagccggaaggtacgccaacagccgcgacttcctgtacgccaggatgctgcatgacgacatcttcaatctcgttgggatagacgttaaaaccggaaaccagaatcatgtcttttttacgatcgacaatgcgcaggaatccttcttcatccattaccgcgatgtcgccggtgtgtaaccagccatttttgatgatttcatcggtagcatcgggacgctgccagtaacccagcatcacctgcggtcctttgacacaaagctcacccggttgacctggtggtacttcattatcatcatcatccaccagtttggcttccgtgctcggcaccggcaaaccgatgctaccactatgataatcaatatcatatgggttaacgctgaccagcggcgcacactcggtaaggccatagccttccagcagatactgtccggtcagtttcacccaacgctctgccaccacttgctgcactggcatcccaccgcctgcggaaagatgcagactggagaaatccagctgctggaactctttattgttcagcaacgcattgaacaaggtgttaacgcccgtgatagcggtaaacggatatttcgctaactcttttaccaaccctggaatatcgcgcgggttagtgataagcaggttctgcccacccagttcgataaacagcaggcagttaatggtcagggcaaaaatgtgatacagcggcagcgccgtcaccaccagctctttgcccggatgcaacagcggaccataggtcgcgttaacctgttccaggttcgccagcatattgcggtgagtcagcatcgcgcctttcgccacaccagtggtgccgccggtgtattgcagaaaagctaaatcttccggcaccagttcgggtttgacgtactgcatccggtagccgttatgcagtgcgctacgaaaactaatggcatctggcagatggtatttcggcaccaaacgcttgatgtatttaacaacgaaattgactaccgtgccttttgccgtagatagctgatcgcccatacgggtcagaattacgtgctgaacggcggttttatcaaccactttttccagtgtgtgagcaaagttagacacgataacaatcgcgcttgcgccgctatcgttaagctgatgctcaagctcacgcggggtatacaacgggttaacgtttacgacgatcatcccggcacgcaaaatgccaaacagcgccaccggatattgcaataaattaggcatcatcaacgcaacgcgatcgcctttcttcagccccaacccttgttgcaaataagcggcaaacgcgcgactgcgttcttccagcttgcggaaggtcattacctcccccatattcacaaacgcaggttgatcggcgtagcgcgcgacgctctgctcaaacatatctaccagagattgataacggtcagggttgatctccgtcggaacgtccgcgggataacggttaagccaaaccttcttcaattcttcacctctaaaatgcgtgttcgtcgtcatcgcaaccccaaatgatatacatgccgttaacataatattaactcatcataccagcttgataattacccaacgaaaaggttgcgaagcgcgtcactatttatttttatctttaccgtaagaatgcagaaacagcggaccagccgctgtttctttttctttaaaaacaagcaattattcagttacaactgtttgtactctcgcggggccgggattataccagccccatccgccgtagccatagggccagccacgaccgccataaaaccatggatcaatcggctgaggcggcataatcacctgctgggttaaatgccaacgtttgtaacccgttacttgcatcaccataaatttatagggcgtattgccgattttgccgtcaaccgcaccagtgattggcccgactaccgtaaccagttgtccacggaaatccaccgggtccagaaaaccgttcacatcggcataaatgcgaccgcgagaaggttctcccagcgtcggtctggctccgctgtccagcggtacggtagcaatttccaggcgagttttcccttgctggttttgtaccgcaaccactttgccaccaaagcgtgcctcctgaccaacgtacagctgcggcgcactcatcacccgaactaaatcttgttgcggcgtgggactgctgcctttaatggcgtccggcacagtgacacaaccgctcagcattagcgcaaacgtacctgccagtatgcctttgataacattcttttgaaccgccatggtgcgactcctttttttctcagggcatactcttaagattcattctttgcccggaagtttcttccatgcgacgttgttacgtaaataaaccggttcggcatgttccaccgccaccgttttaccctcagcaaacatctgacacgcaatcggcagcatatcttcagcagcaggcagtaacacttcgccatcgcgcaaaaccagcccgctctctttaccgagatccggccaagcttgccagcccgtccctaccgtcacccattcgccggaaagctgttgcattcgttcatggacgatttcgggtttgagtacggcttcggtttcttcaccgtgccagataccgttttcatcacgctgatattcggcccagtaaacttcgcccattcgcgcgtcaatggctgccagcacgcgggttgcgccgtttttgcgccacgccccttgcgccatcgtcattagcgtggagacgccaatcatcggtaattccgcgccaagcgccagcccttgcgcgatgccaataccaatgcgcacgccagtaaagctaccggggccgcgcccgtaagccagagcgttaatatcagtcagggaagttccgctggtggtcaggatatcctgcaccatcggtaagattcgttgagtatgttcacgagggcaaagctcaaaatgagcgttgacagtaccgtcgttccacagggcgacagagcaggcctctgtcgcggtatcgatagccagaattcgcatgggtcttcgtgcttagatcaataaaaaggcgcgcatcataccatactccgtaacaaattacctggaggatggtatcgcaaggaaacgaaccgcacgggcaatgtcacgggtgcgtggcgcgggcggcagactggcgagaaacgtcgcgccgtaaggacgcatcaccagccgattgtcacaaatcaccagcacgccacgatcgtcggcgtcgcgaatcagtcgccctaccccctgtttgagagtaatgacggcatctggtagttgcacttcatcgaacgggtcgccaccgcgcaaacgacaatcttccatgcgcgcttttaacagtggatcatccgggctggtaaacggcaatttgtcgataattaccaaactcaatgtatcgccacgcacgtccaccccttcccagaaactgctggttgccacaagaagcgcattaccggcgctgacaaattgctgcaacagttgccctttgctggtttccccctgcaacaatacaggaagcgtcatggtagcgcggaactgctcggccagatcgcgcatcatggcgtggctggtacaaagcataaaacaacgaccgttgttagcttcgatgatcggtcgcagcattgccgctaactggcgagcagaacctggctggttggtttgcggcagattgcgcagcacacagagtaacgcctggcggctgtaatcaaatgggctgggcaacagcaagctctcggcctgttcgatgccaagccggctggtgaaatgatgcagatcgtcgttcacgctcagcgttgcactggtgaagatccagctaccgggtttttgcgccattaactctttgaatttatccgccacgctgagcggcgtgagagccagagtaaaatggcggctagtgcattcgtaccagtagctgtagcccggctgattgatctcttttagccgcttcagccgtgtgcgatacaacgtggcgcgctcaaatgccgcatccagcaaggcggaacgccccagactcagtttcgccacgtcataacaaagttccagggtgtcatcgagcagtaaaaatgcccgctgaatttgcggattagctaacagctcacgcaggttaccgcgataacctggctcaccgagttgcagacgaaaatcctgcgcactctgggcaagacgatcagcgcacttttgtaactgctgggtgtcttttaattcggtgcggtaggcgatggtgatgtcttttgccaggtcgagcagttgtcgactggagagactctgaccaaaatactggctggcaatgtccggtagctggtgggcttcgtcgaagatcatgacgtccgcttccgggatcagttcgccaaatccactctctttaaccaccatatccgccagaaagagatgatggtttaccaccaccacatcggcgtccatcgcttttttacgtgctttgaccacaaagcaatctttatacatcgggcagtcgctgccaagacagttgtcgttggtgctggtgaccagcggccacgcctgactatcttccgccacgctgacgcaggtgctgatatcaccatcgactgtttgattagaccaggagcgcagcaggatcacatcgcttaagatttgtaccggcagatcgccccccgccagcgcctgctgttcgagacgttcgaggcagaggtagttactgcgccctttcagcagcgccacgttgcccgtatatttcaatgccttactgactgttggcaaatcgcggctgtagagctgatcctgcaacgctttactgccggtgctgataatgactttctttttcgcccgcagcgcaggagccaggtaagcgtaggttttgcccgtaccggttcctgcttccaccaccagcggctggcctttttctatcgcctgggtgacggctaccgccatctgtcgctgtggttctcgcggcttaaagcctggtatcgctttcgccagctgaccgtctggtgcaaaatcgtccgtcacactaccccctgttgatttgaacagggattatgtcaggatgagggcgctttcgccagttgaagtggtgacggcgacctcacattgtggcagtctttgcagcacgaaaatggaagtataatgaggacaaaatgatgactatcgttcgtatcgatgctgaagcccgctggtctgatgtagtaatccacaacaacacgctctactacactggtgtaccggaaaacctcgacgccgatgcctttgagcaaaccgccaacacgctggcacagattgacgccgtgctggaaaaacagggcagcaataaaagcagcattctggatgccaccattttcctggccgataaaaacgacttcgcggcgatgaataaagcgtgggatgcttgggttgtcgcgggtcatgcgccggtgcgctgcacggtacaagcgggtttgatgaacccgaagtataaagttgaaattaagattgtggctgcggtgtaagctttatcgaagcaaaataagtcagacgataatttatcgataatactggtcggttttacataaatcgaccagagaataagatattactgttgatgcttctgctaattcattatttatatttataatttcaattttatctataaaactaactatataaataaacataaacatgccgttgtgttcgccctttgattagcaactctggttttctttcttagctgaacaatctggttatagcgtgcggactgaccgttaaatttctccatcttactggataacacaccatgagctgctacctttaaaacacctgaatgtcaacaggttaactcgtgccatatcgttataatccctttgatattagatgcaaattaaggtcatatatagccttatcgataacatggttaattttaaggataagaatatgcctgctgtaatagataaagccctggatttcattggtgccatggatgtaagtgcgccaacaccaagtagcatgaatgaaagcacggcgaagggaatctttaaatatttaaaagaactgggagtacccgcgagtgccgctgatattacggcgcgagctgaccaggaaggctggaaccctgggttcacggaaaaaatggttggatgggcaaaaaaaatggagacaggtgaacgttctgtgattaaaaatcctgaatactttagtacatatatgcaggaagaactaaaagcactggtctgagttaaatttatatcagcataaatgggtcaggacgcttttaatcacatataaaaagcgtcctttttctcacaatcaaatgatcatcggcttctataacgaaatcgatacggattagtgtgttactcgtcttcatcctcaaaacgcgccacgattcgctcgccggagtggttggcacgcagctcttctgccaccagcgcgattgcctggccgctgctcatcccttgtgccatcagttcctggatccgctcgacagctttttgctgctgttcatgggtgagactaggtaaacctgcaaacattgttaactcctgctaaattgttggcgctaattatttcatgctacccggcacatagccagtagagtcaggactgatgaagacgttatctcccgctgtgattactttactctggcgtcaggacgccgctgaattttatttctcccgcttaagccacctgccgtgggcgatgcttttacactccggctatgccgatcatccgtatagccgctttgatattgtggtcgccgagccgatttgcactttaaccactttcggtaaagaaaccgttgttagtgaaagcgaaaaacgcacaacgaccactgatgacccgctacaggtgctccagcaggtgctggatcgcgcagacattcgcccaacgcataacgaagatttgccatttcagggcggcgcactggggttgtttggctacgatctgggccgccgttttgagagtctgccagaaattgcggaacaagatatcgttctgccggatatggcagtgggtatctacgattgggcgctcattgtcgaccaccagcgtcatacagtttctttgctgagtcataatgatgtcaatgcccgtcgggcctggctggaaagccagcaattcagcccgcaggaagatttcacgctcacttccgactggcaatccaatatgacccgcgagcagtacggcgaaaaatttcgccaggtacaggaatatctgcacagcggtgattgctatcaggtgaatctcgcccaacgttttcatgcgacctattctggcgatgaatggcaggcattccttcagcttaatcaggccaaccgcgcgccatttagcgcttttttacgtcttgaacagggtgcaattttaagccttagcccagagcggtttattctttgtgataatagtgaaatccagacccgcccgattaaaggcacgctaccacgcctgcccgatcctcaggaagatagcaaacaagcagtaaaactggcgaacagtgcgaaagatcgtgccgaaaatctgatgattgtcgatttaatgcgtaatgatatcggtcgtgttgccgtagcaggtagcgtaaaagtaccagagctgttcgtggtggaacccttccctgccgtgcatcatctggtcagcaccataacggcgcaactaccagaacagttacacgccagcgatctgctgcgcgcagcttttcctggtggcagtataaccggggctccgaaagtacgggctatggaaattatcgacgaactggaaccgcagcgacgcaatgcctggtgcggcagcattggctatttgagcttttgcggcaacatggataccagtattactatccgcacgctgactgccattaacggacaaattttctgctctgcgggcggtggaattgtcgccgatagccaggaagaagcggaatatcaggaaacttttgataaagttaatcgtatcctgaagcaactggagaagtaagacgtggaataccgtagcctgacgcttgatgattttttaagccgctttcaacttttgcgcccgcaaattaaccgggaaaccctaaatcatcgtcaggctgctgtgttaatccccatcgtccgtcgaccgcaaccggggttgttgctgactcagcgtagcattcatctgcgtaaacacgctggacaagtggcattccctggaggtgcagtcgatgacacggacgcaagtgctatcgccgccgcgctgcgcgaagctgaagaagaggtcgctataccgccttccgccgttgaagttatcggcgtgctgccgcccgtcgatagcgtcactggctaccaggtaaccccagtggtcggcattatcccgcccgatctgccgtatcgcgccagtgaagatgaagtcagcgcggtgtttgaaatgccgctcgcccaggcattacatctgggtcgttatcaccctttagatatctaccgccgtggtgatagtcatcgggtatggctgtcctggtacgaacagtattttgtatggggaatgaccgcaggcataattcgtgagctggcgctgcaaattggtgtgaaaccctgactatacttatctttacatctacaaaacactacttgagacaatcatcgcaatattagttaaatcgcggtttttgattagtttaattcatgtgaatagttaagccagtcgccgcgttccctcttacactatgcgctgttattagttcgttactggaagtccagtcaccttgtcaggagtattatcgtgattagtctattcgacatgtttaaggtggggattggtcccagttcttcccataccgtagggcctatgaaggcaggtaaacagttcgtcgatgatctggtcgaaaaaggcttactggatagcgttactcgcgttgccgtggacgtttatggtagtctgagcctgacgggtaaaggccaccacaccgatatcgccattattatgggtcttgcaggtaacgaacctgccaccgtggatatcgacagtattcccggttttattcgcgacgtagaagagcgcgaacgtctgctgctggcacagggacggcatgaagtggatttcccgcgcgacaacgggatgcgttttcataacggcaacctgccgctgcatgaaaacggtatgcaaatccacgcctataacggcgatgaagtcgtctacagcaaaacttattattccatcggcggcggttttatcgtcgatgaagaacactttggtcaggatgctgccaacgaagtaagcgtgccgtatccgttcaaatctgccaccgaactgctcgcgtactgtaatgaaaccggctatagcctgtctggtctcgctatgcagaacgaactggcgctgcacagcaagaaagagatcgacgagtatttcgcgcatgtctggcaaaccatgcaggcatgtatcgatcgcgggatgaacaccgaaggtgtactgccaggcccgctgcgcgtgccacgtcgtgcgtctgccctgcgccggatgctggtttccagcgataaactgtctaacgatccgatgaatgtcattgactgggtaaacatgtttgcgctggcagttaacgaagaaaacgccgccggtggtcgtgtggtaactgcgccaaccaacggtgcctgcggtatcgttccggcagtgctggcttactatgaccactttattgaaagcgtcagcccggacatctatacccgttactttatggcagcgggcgcgattggtgcattgtataaaatgaacgcctctatttccggtgcggaagttggttgccagggcgaagtgggtgttgcctgtagtatggctgctgcgggtcttgcagaactgctgggcggtagcccggaacaggtttgcgtggcggcggaaattggcatggaacacaaccttggtttaacctgcgacccggttgcagggcaggttcaggtgccgtgcattgagcgtaatgccattgcctctgtgaaggcgattaacgccgcgcggatggctctgcgccgcaccagtgcaccgcgcgtcagcctggataaggtcatcgaaacgatgtacgaaaccggtaaggatatgaacgccaaataccgcgaaaccagtcgcggtggtctggcaatcaaagtccagtgtgactaatacttcttactcgcccatctgcaacggatgggcgaatttatacccgctttctcgtctgctgtaatattccccactacacttccactgttgcgtcaggcgtttgtcgccatacgcttacagggtggcccgcatgcaaaaagcacaacggatcattaaaacctatcgtcgtaatcgaatgattgtttgtacgatttgcgcactcgttacgctcgctagcaccctgagcgtgcgatttattagtcagcgtaacttaaatcaacaacgggtagtacaattcgccaatcacgctgtagaggaattagataaagtactgcttcccctacaggcaggtagcgaagtcttgcttccgctgattggtctgccctgctctgtcgcccatttgccattacgtaaacaggcggcaaaactccaaactgtgcgatccattggcctggtgcaagacggcacactttattgctccagcatttttggttatcgcaatgtgcccgtcgtggacattctggctgaacttcctgcaccgcaaccacttttacgcctgacgatcgaccgtgccctgattaaaggcagtccggttttgattcaatggacgcctgcagcgggcagtagcaatgctggggtcatggagatgattaacatcgacttactgacggcaatgctgcttgagccacaactgccgcaaatcagtagcgccagcctgacggtggacaaacggcatttgctctatggtaatgggctggtagattcccttccgcaacctgaagacaatgaaaactatcaggtttctagccaacgctttccttttaccattaacgttaatggtccgggggctacggcgctggcatggcactatcttccaacacaattaccgctggcggtgctgctaagtttactggtgggctacatcgcctggctggcgaccgcttaccgaatgagcttttcccgcgaaatcaatctgggcctggcgcaacatgagttcgaattgttctgtcagcctttgcttaatgcgcgcagccagcaatgtattggtgtagagattttgctgcgctggaacaatccgcgtcagggctggattagtccggatgtgtttattcctatcgcggaagaacatcatttaattgtgccactgacccgctatgtgatggcagaaaccattcgtcagcgccatgttttcccgatgagtagtcagtttcatgttggcattaacgtcgcacccagccattttcgccgtggtgtgctgataaaagatctcaatcagtactggtttagcgctcacccgattcagcaactgatcctcgaaatcaccgaacgcgatgccttactggatgttgattatcggattgcccgcgagctgcatcgtaaaaacgtcaaactggcgattgatgacttcggcaccggcaacagcagcttttcctggcttgaaacattacgtcctgacgtgctgaaaattgataagagttttaccgcagctataggttctgacgcggttaacagcacggtgaccgatatcatcatcgcgctggggcaaagactgaatattgaactggtggcggagggcgtggaaacgcaagaacaggcgaagtatttgcgccgtcatggcgtgcatattttgcaagggtatttgtacgcacagccgatgccgctacgtgattttcccaaatggctggcgggcagccaaccgccgcccgcccggcataatggacatatcacgcccattatgccgttacgttaacgcttactcatcttcatcgtgcgccggttgctctttaacaatgcgaaccagatcaacacgataatcattggcttcaatgatggtgatatgcagtggccctacatcaatcacatcgcccacacggggaatgtgaccatttgcgctgatcacgaggcccgcgaccgtcgcgatatcatcgtcatcggcaaggtgctcaacatcaagcgcctgctgcaaggcatgcaaatctgtaccgccttttaccagccagccgtcaccatcagtaatgatttccggcgtttcgtcagcgtccgggaattcacccgcaatggcttccagcacatccagcggcgtgaccagaccttgtaccacaccaaactcgttggtcacgataacaaagctcccgcgagcacgacgcagcacgcccaacaggttgatcggatcgagggtttccgggacgataatcgccggagacgcgctagcaatcgccgccacatcaacgccctcttccagcgccaccagcagttctttagcacgtacaataccgatgatttcatccagttcaccgcgacataccgggaacagactgtgcggactagagagcagttgctcgcggatttcatcgaccccgagattagcgtcaacccagcttatttcaccgcgcggcgtcatgatcccgcgcagagaacggctcgccagcgtcagtacgccgttaatcatgtaacgttcttcttcggcaaatgcaccttccgggatcggcatcggcatcgggttatcggcatcgtgctgaacattggcctgacgtttcccgcccatcaaacgcaggatggcatcggcagtacgcgctcgcagcggcaaagtgctctggtggcgaataaagttgcgacgcgcaatctggttaaacacttcgatgatgatgctgaagccaatcgcggcatacaggtagcctttcggaatgtggaaaccgaaaccttctgccaccagactcagaccaatcattaacaggaagctcagacagagcaccaccaccgtggggtgctggttaacgaatcgcgtcagcggtttggatgccagcaacataaccgccatcgcaatcactaccgccgccatcatcaccggcagatggttaaccatccctactgcagtaattaccgcatccaagctgaagacggcgtcaaggatgacaatctgtgtgacgaccacccagaaactggcgtagcctttaccgtggccggaatcatgatcgcggttttccagccgttcatgcagttcggttgttgctttgaacagcaagaatatccccccgaacaacataatcaggtcgcgtccggagaaggagaaatccatgacggtaaatagcggtttggtcagcgtgaccatccaactaatcaggctcagcagccccagacgcataatcagcgccagacttaaccccagcaaacgcgctttatcgcgttgttttggcggcagtttgtcagcaagaatggcgatgaagaccaggttatcgatacccagcacaatttcgagaacaacaagcgtgagtagccccgcccaaatactggggtccattaagaattccatgacaagctcctgcttaaggaatagctattcgacgccagaaataatgcaggcgtaacgacaaaatgcaaacgaaaggtgcggcatagagtgccagaaaggcaggcgttaaaaggcctgatgctgaaatgacgtcggtgacgatccatactgcgggctactgccctatactccatggttgttaaacgggagttaaacatatcagagacgcctctgatttggcaaagatttaccttcctttgcaaacgaatgtgacaaggatattttacctttcgaaatttctgctaatcgaaagttaaattacggatcttcatcacataaaataattttttcgatatctaaaataaatcgcgaaacgcaggggtttttggttgtagcccttatctgaatcgattcgattgtggacgacgattcaaaaatacatctggcacgttgaggtgttaacgataataaaggaggtagcaagtgaccattgctattgttataggcacacatggttgggctgcagagcagttgcttaaaacggcagaaatgctgttaggcgagcaggaaaacgtcggctggatcgatttcgttccaggtgaaaatgccgaaacgctgattgaaaagtacaacgctcagttggcaaaactcgacaccactaaaggcgtgctgtttctcgttgatacatggggaggcagcccgttcaatgctgccagccgcattgtcgtcgacaaagagcattatgaagtcattgcaggcgttaacattccaatgctcgtggaaacgttaatggcccgtgatgatgacccaagctttgatgaactggtggcactggcagtagaaacaggccgtgaaggcgtgaaagcactgaaagccaaaccggttgaaaaagccgcgccagcacccgctgccgcagcaccaaaagcggctccaactccggcaaaaccaatggggccaaacgactacatggttattggccttgcgcgtatcgacgaccgtctgattcacggtcaggtcgccacccgctggaccaaagaaaccaatgtctcccgtattattgttgttagtgatgaagtggctgcggataccgttcgtaagacactgctcacccaggttgcacctccgggcgtaacagcacacgtagttgatgttgccaaaatgattcgcgtctacaacaacccgaaatatgctggcgaacgcgtaatgctgttatttaccaacccaacagatgtagagcgtctcgttgaaggcggcgtgaaaatcacctctgttaacgtcggtggtatggcattccgtcagggtaaaacccaggtgaataacgcggttagcgttgatgaaaaagatatcgaggcgttcaagaaactgaatgcgcgcggtattgagctggaagtccgtaaggtttccaccgatccgaaactgaaaatgatggatctgatcagcaaaatcgataagtaacgtattgtgttgattatcactcagttttcacacttaagtcttacgtaaacaggagaagtacaatggagattaccactcttcaaattgtgctggtatttatcgtagcctgtatcgcaggtatgggaagtatcctcgatgaatttcagtttcaccgtccgctaatcgcgtgtaccctggtgggtatcgttcttggggatatgaaaaccggtattattatcggtggtacgctggaaatgatcgcgctgggctggatgaacatcggtgctgcagttgcgcctgacgccgctctggcttctatcatttctaccattctggttatcgcaggtcatcagagcattggtgcaggtatcgcactggcaatccctctggccgctgcgggccaggtactgaccatcatcgttcgtactattaccgttgctttccagcacgctgcggataaggctgctgataacggcaacctgacagcgatttcctggatccacgtttcttctctgttcctgcaagcaatgcgtgtggctattccggccgtcatcgttgcgctgtctgttggtaccagcgaagtacagaacatgctgaatgcgattccggaagtggtgaccaatggtctgaatatcgccggtggcatgatcgtggtggttggttatgcgatggttatcaacatgatgcgtgctggctacctgatgccgttcttctacctcggcttcgtaaccgcagcattcaccaactttaacctggttgctctgggtgtgattggtactgttatggcagtgctctacatccaacttagcccgaaatacaaccgcgtagccggtgcgcctgctcaggcagctggtaacaacgatctcgataacgaactggactaacaggtgagcgaaatggttgatacaactcaaactaccaccgagaaaaaactcactcaaagtgatattcgtggcgtcttcctgcgttctaacctcttccagggtagttggaacttcgaacgtatgcaggcactgggtttctgcttctctatggtaccggcaattcgtcgcctctaccctgagaacaacgaagctcgtaaacaagctattcgccgtcacctggagttctttaacacccagccgttcgtggctgcgccgattctcggcgtaaccctggcgctggaagaacagcgtgctaatggcgcagagatcgacgacggtgctatcaacggtatcaaagtcggtttgatggggccactggctggtgtaggcgacccgatcttctggggaaccgtacgtccggtatttgcagcactgggtgccggtatcgcgatgagcggcagcctgttaggtccgctgctgttcttcatcctgtttaacctggtgcgtctggcaacccgttactacggcgtagcgtatggttactccaaaggtatcgatatcgttaaagatatgggtggtggcttcctgcaaaaactgacggaaggggcgtctatcctcggcctgtttgtcatgggggcattggttaacaagtggacacatgtcaacatcccgctggttgtctctcgcattactgaccagacgggcaaagaacacgttactactgtccagactattctggaccagttaatgccaggcctggtaccactgctgctgacctttgcttgtatgtggctactgcgcaaaaaagttaacccgctgtggatcatcgttggcttcttcgtcatcggtatcgctggttacgcttgcggcctgctgggactgtaagactgttgtacactaccggggccttttggccccgtttttttatctggaggattaatgacaatcacggacctggtactgattcttttcatcgccgcactcctggccttcgcgatctacgatcagttcatcatgccccgccgtaacggccccaccctgctggcaattcctttgctccggcgtggtcgcatcgatagcgttatcttcgtcggattgattgtcattcttatctataacaacgtcacgaatcatggtgcgttaataacgacatggttattaagcgcactggctctgatgggtttttatatattctggatccgcgttccgaagatcatctttaaacaaaaaggttttttcttcgccaatgtctggattgaatatagccgaatcaaagcgatgaacttgagcgaagatggcgtgttggtgatgcaattagaacagcgtcggctgttaatccgcgttcgaaatatcgacgatctggaaaaaatttataagcttctcgttagtactcaataagttatgaatttagccaaagctatgtttagtgtatttttaataatcagacatagcttaggctatattacctcttcccttatttgttatttattttaacgtttcattgatatataaatccaaatgaaaatcgttatcaataaagcaatgaaataatatattccaacagttgttttatattctcaaaatatgttaaggttgcgccctcatttggggagtagccgatttccagattccggaaatgtacgtgtcaacatactcgttgcaaaacgtggcacgtacggactgaatactttcagtcaggcgagaccatatgcacatcaatcgctatgcctgcatgaacgcgaaaaccatcacggcttgttgttcatgtatgcatgtttgctgggggcgatgatgtgttttatggataccccggtcaggacattgtcatgaatatcactgctactgttcttcttgcgtttggtatgagcatggatgcatttgctgcaagtatcggtaaaggtgccaccctccataaaccgaaattttctgaagcattgcgaaccggccttatttttggtgccgtcgaaaccctgacgccgctgatcggctggggaatgggcatgttagccagccggtttgtccttgaatggaaccactggattgcgtttgtgctgctgatattcctcggcgggcgaatgattattgagggttttcgtggcgcagatgatgaagatgaagagccgcgccgtcgacacggtttctggctactggtaaccaccgcgattgccaccagcctggatgccatggctgtgggtgttggtcttgctttcctgcaggtcaacattatcgcgaccgcattggccattggttgtgcaaccttgattatgagtacattagggatgatggttggtcgctttatcggcagtattattgggaaaaaagcggaaattctcggcgggctggtgctgatcggcatcggcgtccagatcctctggacgcacttccacggttaataagaacgctgccagaggtgaatattaaagtccgtctggcagtcgaacacttcttttgctgccagtgtttgccagacttctggcttcgcacgccaggcaaacggcgtcatctgcaataatgcgacggcttcatcaccgcgaagacgcatcggataacacaactccgcactctgctgtaatgtaaaaccttccagttgttctgcatgaggtgcatgaagatgtacttcattgtaaatcagccccttcagctccatcaaatgtcgcggtcccggcgtggcagtaatgacccagccgccgggcttcactactcgtgctaattcttctgctttacacggcgcgtaaatacgtattatggcgtccatactggtatcggaaaacggcaaacggtggctggaagcgacacaaaaagtgacctgcggatagcgtttcgccgccgcttttatcgctaccttgctaacatccagaccaaacgtggtgatttcgggcaacgcatcggcaaatgcgtgtgtgtaatacccttcaccacagccaatatccagcaccgccgtggccttatcatcaagccgttccctcagttgggcgacaattgcatcacgcagcggctgataatgtccggcatctaagaatgcgcggcgtgcttgcatcatttccgcgctgtcgcccggatcacgagaccgtttatgctgaacgggcagcagattgacatacccttctttcgccatatcaaactgatgtcgctggggacagatatagctgtttttttcacggctaagaggctgatggcaaagtggacaggaaaaagacatgacaactccggcaggatactaaaggccgcaagtgtaacgcgaatcacgcggcgggcaaatatccgaacgccaggagcgaagataaagcatagtaaaaagcctcgcattcgacgaggctttatagcgagattgaagcgtattcacacttcagatcagtggattcgatcagatagctgttacgttaacagctgccggacctttctggccgtcctgaatttcgaactcaacgttctgaccttcagccagagttttgaagccattaccctggatagcggagaagtgtacgaacacatctttgctgccatcagccggagtaatgaagccaaaacctttagactcgttgaaccacttaacctgacctttaatctttgccatttgaaaaattccttagattgttttcttcgcccgcaggcataacatagataaaacactcacattactgcaactggcaccaatataaggctcggcagagaagcggtattcaacgtcaacgtgtttactcaggacttctttactgaaaatgccacacataaacagaactgtacctcgtttaacccgaaatctgttatcacatacaacgttaattatggcaagccatttttaaacatgtctcgatcagacgcacaaatctcgatacgtcttccactttttttgcacacttatgcaacggaatacgcgccgatatatcattgtgcttaaccttgccagttcaggcagatacttaaactggcgtattttctaacatagttcaataagttcagttgttccaggccagtgggagaagttattacatagtgcgtgcaatatcacattttttgctatgcaatgaataaaaagttatatcactttttctcataaaacagtcagttaacggctattaattaccctaaagagaagtcaatccccaaagggattgtaaatttaaaataagaaaaattgatgaatgagcaaaaaaatcaagagagaaacgtttcgctaataaataataccacgcttaatcacaaatccgatgtaaacatcctaataaattaatggggtaaatatctttttctgatatcccgttacgcaaataaataatatgataattatttgaagtcagaccagagttttaatttgaagcagttgcaccatgacagtgcgtataatcaggatgaattgagtaacccttcaacgacggggttactcaagattgaggaaggattatcgttcggcgaccagacgaataatatcttcgtcttcaacgcttttttgactctcaacggtctttttatctgctttctctggttcgtttgcttcgcacaaacgacgtaacagtgcattttgacgtttttgctgatccagcaacgcctcaagcagttcaatctgttcgttagtccgactactggcacgattgataaaaaaccacaagatgagcccgataagaagaaccaccacgcttacaaccaaagacgcaatgttcatcacgccactatttacaacttcgttcatttcaccacctctgagtagaggcgctattctaccactgctggagaggaagaaaatctagtgctgaaaaaatgatatcaccacgggataaactggttaatggcacaaattccgctgaaaaattgtacatcctgatcgcacatcatgttgaatacctgcgcccaaagcagcaagcaagccaacaccacgacaaccagaacgacccatcgaaactttttcactccaatctccgtttcacctaccttatgtcattaaactagcatgcgttagttaaacagcgcctaactatgtcgatattcgtgctttttcggaatgagtcgcttgcttcagcgcatattgccgctacgattaagcgaacataaaaagagaagaggttgtaatgcgattcatcattcgcacagttatgctgatagcactggtatggataggattattactcagcggatatggcgttttgattggaagcaaagagaatgccgcaggattaggtttgcaatgtacctatctgactgccagaggcaccagcacggtacaatacttgcacactaaaagtggtttttttggggataacagattgcccgctgttacgcaaaagcaatatcgtggtcgataatggttaagggcaataaataaccagattctcactcctgagtaaaatactcttatagcaagcgcgtttaatataacgccaccttcaactttatttttctcatgctaaataaagaacctgtctgtttgatattccgacaggttcttactctcatcagaacggatagtcgtgataacccatttgggcagaaattttgcgcgctgcggtatgcaacattgcgacatattcctgtaaacgctcttcagagaaacgcaacgtcgggaaggagatgctcaaaccggcaatgaccacgccaaagcgatcaaataccggtaccgcaatgcatcgcagcccttcttcctgctcttcattatcttcgccatacccctgctcgcgcacctggtccagaacgggtaataacgcttctgtactggtgatggtccgctcggtactgcgtttatactccacgccctcaagaatttgcttcacttcatcgcgatcgcgccatgccagcagtaccttaccaatcgcggtgctgtacagcggattacgacgcccaatccgactatacatgcgcaaattgtacatagagtcaattttgtgaatgtaaacaatactgtcttcgtccagtgcgccgaggtggatagtttctttggtcaggcgggagagctcacgcatctggatatctgcgctacgaattaaatcgacgttttgtaacgcgcgagcgcccagttcaaacaatttcagggtcagggaatatttctcgctctccccttcctgcgccacataacctaaggttttcatggtctgtaaaaagcgataaacggtgcttttactcatcatgacgcgctggctcagctcggttatccctatttcgcgctcttcacccagcgcctgcaaaatgccaaaaacttttagcacggaagatacagaatcaggctgtttatccagatctgcgttagccatttatcacctcattgcgagtgttttataaaaatcagaactgttttttattataatttcgcaccagggtggtcgcaatccatcttttgccggttagttacaattctgcgacatccaccgtgaatatcagtgctagaatcatacccctgttgattattcaccaaagatataaaattcctatgccaaaagttcaggccgacggcctgccattgccccagcgatacggtgcgatattaaccattgtgattggtattagcatggccgtccttgacggcgcaatcgccaacgtcgccctgccaacaatcgccacggaccttcatgccacgccagccagttccatctgggtagtgaacgcctatcaaatcgccattgtcatctccctgctcagctttagctttctgggcgatatgtttggctatcgacgtatttataaatgcggtctggtcgtttttctgttgtctagtctgttctgcgccctttctgatagcctgcaaatgctcacccttgcgcgtgtcatacaaggtttcggcggtgcagcgttgatgagcgttaataccgcacttatccgcctgatctatccacaacgttttctgggtagagggatgggcataaacagctttattgttgccgtctcttctgctgccgggccgacaattgctgcagcaatcctctccatcgcatcctggaaatggttatttttaatcaacgtaccgttaggtattatcgccctgcttctggcgatgcgttttctgccacccaatggttctcgcgccagtaaaccccgtttcgacctgcccagcgccgtgatgaacgcgttaaccttcggcctgcttatcactgcgttgagtggtttcgctcaggggcaaagcctgacgttaattgctgcggaactggtggtaatggttgttgttggtattttctttattcgccgccagctttctcttcccgtaccgctgctaccggtggatttactgcgtatcccgctgtttagtctttctatttgcacatctgtttgctctttctgcgcacaaatgctggcaatggtttccctgcccttttacctgcaaaccgtgctcgggcgtagtgaagtcgaaacaggtttacttctgacaccgtggccgttagcaacgatggtgatggctccgctggcaggctatttgattgaacgcgtacatgcaggattgctgggggctttagggttgttcatcatggctgcggggcttttttccctggttctgctgcccgcgagtcctgcggatatcaatattatctggccgatgatcttatgtggtgctggatttggcttattccagagtcccaataaccacaccattattacctccgcgcctcgcgaacgtagcggtggagccagtggcatgttaggaacggctcgtctactgggtcagagtagcggcgcggcgctggtggcgctgatgctaaatcagtttggagataatggtacacacgtcagcctgatggctgcggctattctggcagtgattgctgcctgtgtcagtggtttacgtatcactcagccacgatccagggcataaaaaaagcgcgtcgatcaggacgcgctttttagtatttacttcatattacttcaggtattcacccgtacgcagagcttcaattcgtttatccagcggcgggtgggtcatgaacaactcactgaggcttttgctcttaccgttaatgcagagagccatcatgctggttgcttcttgcggttcatagctggttttcaggcgctgcagcgcggcaatcattttctcgcgaccaaccagttttgcgctaccggcatcagcatggaattcacgatgacggctgaaccacatggtgataatgctcgccagaataccaaacaccagttccagaaccgttgcaaccgcaaagtagatcagcgggttgccgttgctctcttcaccttcatcacgatttccgcccataaaacccgcggcaagctgcgccagaatacgggaaataaagataacgaaggtgttcaccacgccctgaatcagcgtcatggtgaccatatcaccattggcgatgtggctgatttcgtgagcaattaccgcctcggcttcatccgggctcatgttctgcagcaaaccggtgctgacagcaaccagagaggcatcacggcgcgcaccggttgcaaaagcgttgatgtccggcgcatggtagatagccacttgcggcatagcgatccccgcctgacgagcctgggttgctacagtattgaccagccaacgttccctttcgttacgcggttgctcgatcacttccccgccaacagatcgtaatgccatccatttggacatcagaaggctaacgaaggaaccaccaaaaccgaacagcaaggccatgatcatcagcccctgaacgctgctgctctgtatccctgtcaggctcagtaccagcccgaaaacgaccattacggccaggttcgttagcaggaagagcgcgattcgcatcataattttctttttacctcagtttaacaaaacgcaatatgcgatacccacatcgtatgggttacgcgactattttcaagtctggatagtgcgtaagtcaccagaaagacacaactttacattttgtagcatctgatttacggcatcttgtcgctgttaaaaaatcaggcacaatttcttgtgcctgattgatattacttgacgggagcgggttgttccgcgggtctggctttttcaagcttcgccagatcgagtgcgatattcaccgtctcatccagataaggatccggctcctggtaatctttcggtagatcatccagtttcttcaactccggtttaccttcgcgtttaaagcgttcgttcaaacgcgccagacgcgtcgcatcatcttcattattctctttctcacgcacagcgtaattcagagaaacgatattgcgcttgtccttcatagcgttgaagcgcgcgatatccttcatgatgttctggaactcaggatctttcgcgatacgcgcattatgttccttcagcagctccggttcaaaggccgttaaatctccacttttcacataagtcgcggcatcaatgctatcccacggcagcgcgttatcttcgaatttctcacccgtttccgtttcttcattacccgtcggcatgatgatgtctggcgttacgcctttacgttgcgtactgccgccgttaacgcgatagaatttctggatcgtgtactgcacagaacccagcgctggccattcaggacgtaacatctgatcgtaaatacggttcaaactacggtattgctgaacggtgcctttaccaaacgtcggttcacccacaaccagcgcacgaccgtaatcctgcattgccgcggcaaagatttcactagcgctagcactgaagcggtcaaccagcaccaccagcgggcctttatagaaaacctgtccgtcggtatcgctatcttcacgaaccttgccgttgttatcgcggacctgaacaatgggacccgcaggaataaacagaccggagaggcttacggcttcagttaacgccccaccgccattgctacgcaggtcgatgatgacgctgctgacattctgtttttccagtttctgcagttgcactttgacatcgtctgtcaaacccacatagaagcccggaatatccagcacgccgactttctctttaccgacggtcttcacgctcattttaaccgcgcggtcttcgagacgaatacgttcacgggtcaacgttacagtacgggtcttggtccctttaccagcaggtaaaatttccagacgaactttactgcccttcggccctttaattaaggcaaccacatcatcaagacgccagccaatcacgtcaaccatcggcttgcctgtttgaccaacaccgacaattttgtcaccaacgctgatagctttactcttcgctgccggaccacctgccaccatgctattgataacggtgtagtcatcatccatttgcagcactgcgccaataccttccaggctcaaactcatttcagtgttgaactgttcggtattacgcggggaaagatagttggtatgcgggtcgatttcacgcgcaaacgccgtcattgccaggctgaaaacatcttcgctgttggtttgcgccagacgacgaatggcaaatttgtagcggcgagtcagggtttcacgaatttctttatccgtttttcctgtcagcttcaggcttaactcgtcgaatttgactttactgtcccacagcgcgttcaactcagcctcgtttttcggccagggcgctttgctgcggtcaaggttataagtgtcgttgccggtgaaatccatcggcttttccagtacgctcaaagcgtactggtaacgctcaaaacggcgcttttgcgccagattgtagagatcgtagaaaacgtcgagtttgccactacgcagttcatcgcctaactcggttttctttttcgcgaactgttcaacatcgcttgccagcagcacgttgtggctgtaatcgagcagattcaggtagcggtcaaagattttggcgctaaatgcctgatcgaggtcgaactggcgataatgagaacgggtgaagcggctcgttacgcgctcacttaccgtcgcatgctgcgtctcttcctttaataccggaatttgatcagcacgcgtgatatcttctacagcgaaggtctggcctgctattgcaagcaggccagctaacgcggtaagcctaaaaaacatgttcatgcctggcccggcctccgtttcagaacaccaggtgttctgcgcgcacaatcaaagacataccgctattcagctggacgcggacgccgtctttggtgatttctaatacggtggcatccatcgcgttttgacccgctttcaccttcagggcttgtccgacagtcagagcactaatgtcagaaaccggggtgtgctgttcttcgcgaggtgcttttactgtttttggcgctttctctaccggcttttgcgcacgaggtttacgttcagcgccttctttgcggcgtggcgtagtcggacgtggcttgcgttcgcggcgcggtgcgtcttctttctcaccagcagttgcggcagcttcgcgttttttcgcttgctgttcagcacgctgtgcctgaacacgcgctttcgcttcttcaagctgcttgcgagcatgctctacatgttgctcgtccagctcaccgcatgggttgccgtcaagatcgacacgcgttgcgccgggtttaacaccgtaaagataacgccagctgctagtgtagagacgtaaagcggatcgcaattgcgttttgctcaggttcatttccccagcaacacgatcgaccaaatcctgaaaaataccgattttcagcggacgcgcttcaccttccgcactgaaacagtggggaaaacgttcggccagaaacgcgattacttctttactgctattcaacttaggttgattttccatgaaatttcctgattacaacggacgtagccaacaagcgcaggcatgaacaggcgtcattataatgacgctatcagtaaatgctacgttatccgttgattatcctgcgacgctcgcaaagaattttttgtaatccgtcgttgcaagcactttttcaagctgtgccacaagctgacgtaagccttgctcgtcctcgtctgtaaagcgaccgaagacggtactatcgatgtcgagaacaccaataatctgatttttcaccaccagcggcagaacaatttcagaattactcgccgcatcacaggcaatatgcccgtcaaacacatgaacatcctcgatacgctgcacttgattgcgggcaaccgcagtgccgcacacgccgcgcccgacgggtatccggacacaggcaattttgccctgaaatggtccgagtaccagtgtatcgtcctcaagcaaataaaaacctgcccagtttatgtcagtgagacgctcatataacaacgcactggtgttcgcaagcgttgccagaaaactggtttctcccgccatcagcgcgttaaagtcgcgatttaaatccgcgtaaaattctgttttgttcattatataatcacttggttgtcttacctggatctgccagcctattaaaataagcattaaatgcgttaatgctcaagatcattcccatcatgggttaagattaatgttaattcttattacatttggcacgtcatggctcttaacacaccacaaattacgccgacaaaaaagataacagtgagggcaatcggcgaggaactgccgcgtggtgattaccaacgttgcccgcaatgtgacatgctgtttagcctgcccgagataaattctcatcaaagtgcctattgtccgcgctgtcaggcaaaaattcgtgacgggcgcgactggagcctaacgcgcctggcggcaatggccttcaccatgctgttgcttatgccgtttgcctggggcgaaccgctgttgcatatctggctgttaggcattcgtattgacgccaacgttatgcaaggcatctggcaaatgaccaaacagggcgatgcgataacggggagcatggtctttttctgcgttattggtgccccgctcattctggtgacctccatagcttatttatggtttggtaaccgactgggaatgaatttacgtccggtactgctgatgcttgagcgacttaaagagtgggtaatgctcgatatctacctggtcggcattggcgttgcttctataaaggtacaggattatgcccatatccaggctggtgtcggcttgttctcttttgtggcgttggtgattttaacgacggtgacgttgagtcatcttaatgtcgaagaactgtgggagcgattttatccgcagcgccccgctacgcgtagggacgagaaacttcgtgtctgtcttgggtgccattttaccggctatccagatcagcgtggtcgctgcccgcgttgccatatcccgctacgcctgcgtcgccgtcatagtctgcaaaaatgctgggcggcgctgttagcgagtatcgttttattgttacctgccaacctgttgcctatttctatcatttatctgaacggaggacggcaggaagatacaattctttccggaattatgagcctggcaagtagcaacattgcggttgcaggaatcgtgtttatcgccagtattctggtaccgtttactaaagtgatcgtcatgttcactttactgttgagcattcattttaaatgccagcaaggtttacgcacacgcattctgttactgcggatggtgacctggattggtcgctggagcatgctcgacctgtttgtcatatctttaaccatgagcctgattaatcgcgatcagatcctcgcttttactatgggaccggctgcgttttatttcggcgcagcggtaattttgactattcttgctgtggaatggctggacagccgcttactttgggatgcacatgagagtggaaacgcccgcttcgacgactgaataaccgcttactttgggatgcacatgagtcaggaaacgcccgctagcacgactgaagcgcagattaaaaataaacgccgtatcagtcctttctggctgctgccgttcatcgcgctaatgattgccagttggctgatttgggacagttatcaggaccggggtaataccgtcaccatcgactttatgagcgcggatggtattgttccaggccgtacgcctgttcgttatcagggcgttgaagtcggaacagtgcaggatatcagcctcagcgacgatcttcgtaagattgaagtcaaggtcagcatcaagtccgatatgaaagatgcgctgcgcgaagagactcagttctggctggtgacgccaaaagcaagcttggcaggtgtctccgggctggacgccctcgtcggtgggaactatatcggcatgatgccgggtaaaggtaaagagcaggatcactttgtcgcactcgatacccaaccgaaatatcggctggacaatggcgatctgatgatccacctgcaagcccccgatctcggtagcctgaacagcggtagtttggtctatttccgcaagatcccggtgggaaaagtctacgactatgccatcaatcccaacaagcaaggcgtggtgattgatgtcctgatcgagcggcgttttaccgatctggtgaaaaaaggtagccgtttctggaacgtttccggcgttgatgccaacgtcagtatcagtggcgcgaaggtgaaactggaaagcctggcggcactggttaacggtgcgattgccttcgatagtccagaagagagcaaacctgccgaggcggaagatacctttggtctgtatgaagatctggcccacagccagcgtggcgtaataataaaactggaactgccgagtggggccggattaaccgccgacagcacgccgttaatgtatcaggggctggaagtcggacagctgactaaactggatttaaatcctggtggtaaagtcacaggggaaatgaccgttgatcccagcgtcgttaccctgcttcgtgaaaatacccgcatcgaattacgcaacccgaaattatcccttagcgatgctaatctcagcgccctgctgaccggcaaaaccttcgagctggtgcccggcgatggcgagccacgcaaagagttcgttgttgtgccaggcgaaaaagcactgctgcatgaacctgatgttctgacgctgaccctgaccgcgccggaaagttacggtattgatgcgggtcagccgctcattcttcacggcgtgcaggtaggccaggttatcgatcgtaaactcaccagcaaaggcgtcacctttaccgtcgccatcgagcctcagcatcgcgaactggtaaaaggcgatagcaaatttgtcgtcaacagccgtgtcgatgtgaaggtggggctggatggcgttgagtttctcggtgccagcgccagtgaatggatcaatggcgggatacgtattctgccgggcgataaaggtgagatgaaagccagctatccactgtatgccaatttggaaaaagcgctggagaacagccttagcgatttacccaccacaaccgtgagtttgagtgcagagacgctgccggatgtgcaggcaggaagcgtagtgctgtaccgtaaatttgaagttggtgaagtgattaccgtgcgtccgcgagctaacgcgtttgatatcgatctgcatattaagccggagtatcgcaaccttctgaccagcaatagcgtgttctgggcagaaggcggggcgaaagttcagctgaatggtagtggtctgaccgtacaggcatccccgctctccagagcattaaagggagccattagcttcgacaacctcagcggtgccagcgccagtcagcgtaaaggcgataagcgtattctgtatgcttccgaaacagcggcccgtgcggttggcgggcagattacgcttcacgctttcgatgccggaaaactggcggtcgggatgccaattcgctatctcggtattgatatcgggcaaatccagacgctggatctgattaccgcacgcaatgaagtacaggcaaaggcggtactttacccggaatatgtccagacctttgctcgcggtggtacgcgcttcagtgtggtcacaccgcaaattagcgcagctggcgttgagcatcttgatactatcctccagccgtatatcaacgtcgaaccaggccggggcaatcctcgccgcgactttgaattacaagaggccaccattactgatagccgttacctggatggcttaagcattattgttgaagcgccggaagccggtagcttaggcatcggtacgcctgtgctgttccgtggtctggaagtcggtacggttacaggaatgacgctggggacattgagtgatcgcgtgatgattgcgatgcgcatcagtaaacgctatcaacacctggtgcgtaacaattccgtcttctggttggcaagcggttacagtctggactttggtctgacgggcggcgtagtgaaaaccggcacctttaaccagtttatccgtggcggcatcgccttcgccacgcctccgggtacgccactggcaccgaaagcccaggaaggcaaacacttcctgttgcaggaaagtgaaccgaaagagtggcgtgaatggggaactgcgcttcccaaataatgcccactgctccggcgtgcctgcgccggagcgtttatgctaaactgcgcgcctgtttttttgccagtggtacatgctcgtggcccaacacaccgtttatttcccggacgcctttctgacacaaatgcgcgaagcgatgcctagcacgctcagttttgatgattttcttgccgcctgtcagcgcccgttgcgccgcagcattcgcgttaatacgctgaaaatctccgttgctgatttcctgcaattaaccgctccttatggctggacgcttacgccaattccgtggtgtgaagaaggtttctggattgaacgcgacaatgaagatgcattgccattgggtagtaccgccgagcatttaagtggcctgttttatattcaggaagccagtagtatgttgcctgttgccgccttgtttgctgacggtaatgcaccacagcgggtgatggatgtcgctgccgcgcctggctccaaaacgacgcaaatttccgcgcggatgaataacgaaggggcaatccttgccaatgagttttccgccagtcgggtaaaagtgttacatgccaatatcagccgctgtggtatcagtaatgttgcgctcacacattttgatggccgcgtgtttggtgcggcagtgccagaaatgttcgatgccattttgctggacgctccctgctctggcgaaggcgtggtgcgtaaagatcccgatgcgctaaaaaactggagtccagaaagcaatcaggaaatcgcagctacacaacgggagcttatcgacagcgcctttcatgcattacgtcctggtggtacgctggtttacagcacctgtaccttaaaccaggaagaaaacgaagccgtttgcctgtggctgaaagagacttaccccgacgcagtagagtttttaccacttggcgatctcttccctggtgcaaacaaagcgctgaccgaagaaggctttttgcatgttttcccacaaatttacgactgcgaaggcttcttcgttgctcgtctgcgtaaaactcaggcgattcccgccttacccgcccccaaatacaaagtcggtaattttccgttcagcccggtgaaagatcgcgaagctggacaaattcgtcaggcggctacaggtgttggcttaaactgggatgaaaacctgcgcctctggcagcgtgacaaagaactgtggttgttcccggtgggcattgaagccctgatcggtaaagtccgattttctcggttggggattaaacttgccgagacgcacaacaaaggttatcgctggcagcatgaagcggttattgctcttgccagtcccgataatatgaatgcattcgagctgacaccgcaggaagcggaggagtggtatcgcgggcgcgatgtttacccgcaagccgcgccagtggcggatgatgtattggttactttccagcatcaaccgattggtttagccaaacggattggtagccgattgaaaaacagctatccgcgtgaactggtgcgcgatgggaaactttttaccggtaacgcctgacagcgcacaaaaaaagcgcactttttgactggcacattcggctgcctcaactaggctgaaaaatggtgcgatcggactggtcgtaccacaatcggcagctaaatggagagcacgaagatgaaaaccagtgtgcgcataggcgcttttgaaatcgacgacggcgaattacacggtgaaagcccaggtgatcgaacgttaaccattccttgtaaatctgaccccgatttatgtatgcaactggatgcctgggatgctgaaaccagtatccctgccctgctaaatggcgaacactctgtcctttaccgtacccgttacgatcaacaatctgatgcctggattatgcgtcttgcctgatccaaaaagaacccgtcggcatggcgggttatttgtcctggttattcccccgttgtaaaatctctcctaaacttaacggtacggcaccacacttcggggatgaaatgttcgcgctggtactttttgtttgctacctggatggcggttgtgaagatattgttgtggatgtctacaacacggaacagcagtgtctttattctatgagcgatcaacggatccgccagggcggttgttttccgattgaggattttatagatggtttctggcgacctgcacaggagtacggtgatttttaattattgcaattgcacaagagtcagttcgcccccaaagacagcaccggtatcaatataatgcaggttgccaatatccacgcgatgtcgcaacggtgtatgaccaaaccagaaatgatcagcacctgtaattccctgccctttttggcgttcacctaatcggctgcggctccacaagacctgatgcaaatcaacgtccttttgccattcataaacatcatctggataatcggcatgagcaataatatgcttgccggtgcgactgtgtacttcaagaataaagggcaaatgctgacatttttccagcgccgttttcgcttgtttctgttgattatctgccagcgcaataaaccagtcgccgccattcatcaaccacaaagacatctgctgggatgccagcgcatccatcgccatctgttcatgattgcctcttaccgcacaaacccaatgttgttccagtaactgcagacaacgtaaactttgcggcccacgatcgataacgtctcccacactgataagtaaatctcgccacggatcaaaacgacaatgccataatttgcggcgcaactgctcaagacaaccgtgtatatcgccagaaagccagatatgtcgccattgatgacccgcaattctctgataaacgggcgcaggctgtttcatcaatattttcctcccgcgctaaagatcacataatcttaacaagaatgttaaaaaacgctggactcagacagtagagtgtgtgttatggttgactataaagtcagcgaaggaaatgcttctggcttttaacagataaaaagagaccgaacacgattcctgtattcggtccagggaaatggctcttgggagagagccgtgcgctaaaagttggcattaatgcaggcttagttgccttgccctttaagaatagatgacgacgccaggttttccagtttgcgtgcaaaatggtcaataaaaagcgtggtggtcatcagctgaaatgttaaaaaccgcccgttctggtgaaagaactgaggcggtttttttattggaaatcaaaaggctattttaggtaattaacagagtttttcagctcgttctataaacggtgccagactcattttttcgccgggattgttaggatcatcaatctgaatcacgctaatgggttgggcattggtcttcccactggcaacttccttttgtgcgatatcgtttaaaggatactgcacgagggtactcggattaataacatacaaagcattacccggtcggcaagtcagcatcacctcttcgcgattaaacgcccatttgtctttacccacttcaaaacgactgacggtaatcacctgcggtgcagccagcgccgctgcagaactggtgagtaacagaaacgccagaatactttttttcatcattttcgtaatccatcaaaaaggttcgagagtcgcaagcaggctgatgatcaccagcactaccgcacctatcgcccattcgagtttagtcatccacacaaaccagggtgccgcacgatcttcatcctgcctcatgcgcggtacaagaacataacgattagccagcgcaatgaccaccataatcatcaccaggatggctttgagcaataagagttggccccagtaagtcgtaagcgtggggggaaatccggtaatcaacaatgcattaagcacgccgcttgccagtacgccgatcaccgcaaaatgcccgcaccaggaaaaacgcatcagcgcctgaatagcctggtgtcgccaacggcctttgatgagttgcatacaccagagcaccggcagtaatcccccaaaccacgccgccgcacaaatcaggtgaatcgcgtgattagtctgatggattttcgctgttaccccttcattcagcgtcgcatgccccactcccgccagcagaataaattgcgcggtagtgagcataaacagcaaacgtggcatattccgcggttgcataagggcgacgatcaacgttacgagggcgagaacaatttgccataaccagatgccaccaaactgcgtttgcaaaacagcctgccaaatgtttgggctaaatacatctgtccatcccgttcccatcaacccgccctgaacggcgagcattgcagtggcactgatcaaactccagacggcagcgtgctgttgtaaacgcagaaaacgcttcgccagcaagcgacgaatcgtcaagggggccagccaggcaccgtacattgcgaagccaaaaaccagcatcaggctggtgaaatggataaatcgcagcgcgatccaggtaaacgccagcatgatttatttcacgctaaaggtgtagtgtcctttcgttttatgcccgtccacgctaacaacatgccagtcaacggtgtaggttccgggtttcaggctatcggccagtggaacaatcagttgcttttggtcctgctcatttcgcttcgccggtaatgttttaatattttcgttttttggccccgtgatttttgcaccactgaatcctgtttcaacaccttcgctgaagtttaaagtgattgcctgcggtgcagctgtcacttgcgcgtttgccgcaggatactgatgcgttaaatgcgcatgtgcccagacggaaggtgtcaccaagctagtggtcaggattgccagcgcgtagcgaagggagcgtgcagtactagccatattatctattcctttttgtaataacttttttacagagcataaccttgtctaatgtctgagtcgaggatcatcaattccggcttgccatcctggctcactcttagtaacttttgcccgcgaatgatgaggagattaagaatgctgaagaatctggctaaactggatcaaacagaaatggataaagtgaatgtcgatttggcggcggccggggtggcatttaaagaacgctacaatatgccggtgatcgctgaagcggttgaacgtgaacagcctgaacatttgcgcagctggtttcgcgagcggcttattgcccaccgtttggctagcgtcaatctgagtcgtttaccttacgagcccaaacttaaataaaacttatacagagttacactttcttacataacgcctgctaaattatgagtattttctaaaccgcactcataatttgcagtcattttgaaaaggaagtcattatgagcttctggaaagttgcagcagcgcaatatgagcctcgtaaaaccagtctcaccgaacaggtagctcatcatctggagtttgtgagggccgccgccaggcaacaatgtcagctgttagtttttccaagcctttctttactggggtgtgattatagccgacgtgcccttcctgccccacccgatctcagtctgttagacccgctttgttatgccgcaacgacctggcgaatgaccatcattgccggccttcccgttgaatataacgatcgctttattcgtggaattgcggtgttcgcaccgtggcgaaaaacgcctgggatctaccatcagagtcatggtgcatgtctgggccgtcgttccagaaccatcacggtggtcgatgaacaaccgcaaggtatggatatggacccgacctgtagtctgtttactacagggcaatgtctgggagaacccgacctgctggcgagcgcccgtcgcttacaattttttagtcatcagtacagcattgccgtgctgatggcaaatgcccgtggtaacagtgcactatgggatgaatatggtcgtctcatcgttcgcgccgatcgtggtagtttattgttagtcggtcagcgtagtagtcagggttggcaaggcgatatcattccattacgctaagctttttcggcctggagcatgccatgttgcgcattatcgatacagaaacctgcggtttgcagggagggatcgttgagattgcctctgttgatgtcattgacggaaaaatcgtcaaccccatgagccacctggtgcgccccgatcgtcctattagtccacaagcgatggcgattcatcgcatcaccgaagccatggtcgccgataaaccgtggattgaagatgtgatcccacactattacggtagtgaatggtatgtcgcgcataacgccagctttgaccgccgcgtactgcctgagatgcccggtgagtggatttgcactatgaaactggcccgtcgtttgtggcctgggatcaagtacagcaatatggcgttatataaaacacgcaagctcaatgtacagacgccgccgggcctgcatcatcaccgcgcgttgtatgactgttatatcaccgccgcgttgcttatcgatattatgaacacctccggctggacggcagaacagatggccgatatcaccggacgtccgagcttgatgacgaccttcacctttggcaaataccgtggcaaagcggtttccgacgttgccgaacgcgatccgggctatctgcgctggttatttaataacctggacagcatgagcccggagctgcgtttaacactgaaacattatctggaaaatacttaatccgcaggcgtagcgggtaatgttccctgcgccagcgcgaccagaaaagcatattccatcgctacgccttcgtagcttttaaagcgaccagatttaccgccatggccactgtccatgtcggtacagagcaataaaagatggtcatcggttttcagctcgcgcaatttagcgacccattttgccggttcccaatattgcacctgagaatcgtgcaaaccggtcgttaccagtaaatgcggataagcctgtgcggtgacgttgtcatacgggctgtagcttttcatgtactcgtaatattgcggatcctgcgggttaccccactcttcaaactcaccagtggtaagaggaatactttcatcaagcatcgttgttacaacatcaacaaacggtacctgggcgataacgccgtggaataattccgggcgttgattaattgcaacgcccatcaacatgccccccgcactcccgcccatcgcataacaaaggctaggagagccatagcccagttttaacaatgcatcgcaggcatcaagataatcattaaacgtatttttcttcttcagaaattttccgtcttcgtaccattgttgccccagctcaccaccgccgcgaacatggacaatggcgtagacaaagccacgatctaacaaactcaagcggctaaaactgaaatcggcatcaatacttgcgccgtaagaaccatagccatacaccagcaacgggttgtgtcctttgcgaaaatgtttgcgatggtagaccaagctaaccggaacttcgacgccatcacgggcgactatccacaggtgttcactgcggtaattcgccgcataaaaaccaggaacttccgtttgttttaatacacgacgctcaccggtatccatatccagttcaaacaaagtgtctggtgtagtcatggaagaataaccataacgcaatcgcgcggtttcaggttctggattgtaggcaatccaggtcacataggccggatcatcaaaggcaataccaatgacttcccgggtcttgcggttaatttggcgcaaactggttaacccgcgctgacgctcttcaaccaccagccagtcggtaaacagcgtaaacccttccagcatgatgttttcgcgtggcggaattaactcttcccactgttgctcatcacgcatacgggtacggtataagccaaagtttttgccgtggcggttggaacgcagataaaaacgatgctggtagtgatcaaggctgtattcgtgatctttgcggcgcggcagaaaaacaaacggctcggcatcggccatttccgcgtccagcaggcgaacttcactggtggtggcgctggccaaatgaatgactacatagtgcttgctggtcgttttatgcaggctgacgtaataggtatcgtctttttcttcgtagatcagtttatcttggcttgctggcgtaccgatggcgtgacgccagacctgataaggcagcagcgtcaccggatgcttgcgaacatagtagaaaatccaggagtcatttgcccagacaaagctgggttcaacgttatccagcagttccgggtaccagttaccagtttccagattacgaaaacgaatgccgtactggcgtcgggaaagaaaatcttctgccagcgccataatggtgttatcgggcgtaatcgccattccgcccatgctataaaactcactatgagctgcgcgcttattggcatcgagcaatgtttcccactcatcccactcttcactgaatgcgctttgacgctggtagatagcatattcacagcctggttcataaatatgccgatagcggtagccatttttgatgtagggcgcagaaacttctcgttgcggaatgcggtcgatgatttcctttaagatgcgatcctgcaaggcttgttgactggccatcacccgatgaccgtaactattttcttgttgcaggtagtccaggacttctggctgagaacgcgtatcgtcccgcagccagtagtaattatcgatgcgcgtatcgccatgaagcgtcatggcgtggggaatgcgggcggcttttggtagcatgttattgttctttctggttgaaacatcttataagggtggcaaaactcaccggggatgcaagcgaaacaggggagtcattgcttagatgatgacaggtaatggcgcggatatcgaatgttatgcagacagagaaaatcagcctgttcaaatggctgtgcgattctggatagcccgaaatagtcaacttcaggctatccagagagcggaattattccgccaaagtgcgtttttgctgttcgagatcgcgttcaatgccgtcacgaacatcctgggggattttcagcgcgtcacccagtgcattcaggtaactgcgttccataaaatggtcaatatcaatagccgcgcaactcaggaaatagatttccagcgcctcttcttcattgcggaccccggtagccaggcgttgtggatccagcggttgttcgattgcctgctcaatgagtacacgcccctgctcttccacgccggctccacgcaattgctggtcgattgccgcacgttctttggcatcaatatgaccatcacttttagcggcaaagaccagcgcaaggatcaaacgtgctgtacgctcatccagcggcgtactttgcgcgccaaactgcggttcgtcctgatgcgccgcgcgaattttatctttgtatttattccacagcaccgtacccgctaccgctccgccgccaaccagtaacgcgttggtgccatatttcgtaagaagtttacgtgcacttttatttgcgaccagcagcccagccagtccgcctaatgcgcctggcactaacagtttgaccaatccctgatccgcagagctggaggtagaagaactgctttgcccaagcagggattgcagttgatttaaccagttagccatatttgctcctcaataaccatttttagtgcctgtagcatagcggatgaggatgtcagaaaatgtatatcgagacaaaagatgcgcaaataagcggggcggtaggccgttattcaaagaaattcgcgccaggtaaggtatttactgtatatcaggtgataagggtattttaggtgaaagtagtttgtcgttttgagtggcattgtttgatgctgattgcccgatgcgacgctgttgcgtcttctcaggcctacgattgtggtgcgttctggggcggacaaggcactcgcgccgcatccgccaacagtcaatcgaattatcagaagccattaacgccgctgatattccgccattcccgctttgcagtccacgctgacctggtaatgaatatcggcacttttaccacgcacggttagcggtacactccatttatcatctttaccctgaatgtcctgcaaactgacccaagccacgggatcggcctgaccgacaattttttgatcatctgcccaacgcgccacgcgattttgttgataatcacgttttacgctcgcggcaattccggcagcatccagatcttcacactttgggaaagtgacgctcttgctggtttcattattggcagcgaaaacacttgcgcaggcagaaaccaacaacagccctaaaaacgcccctctttttttcatgtttttctccatagcacaatgattcaggagaaagcatggtacaaattgtcaggagcgcaagttgcttcaggccgcgtgactggcatcttcctcttcggattcagcaccgacgacctgtggggacggtaatttgccggttttcagaatggtgctcagcacatctttttgttctgccagccataggctaagggcttcacgttgctcgtcttccatttgcactggagaatttgtcagccaggtgtcaagcagatccgccgtatcaagcattttgtcataagcatcggcttcctttttgctggtaaagctcattttctcttcgccctcacgaatgactacgtatttaacttcaaccgccatttgcagcctctcataataactgtgattttatacagtatatttcttttcggttgagaaatcaacatcagcaataaagacacacgcaaacgttttcgtttatactgcgcgcggaattaatcaggggatattcgttatgacgttattaggcactgcgctgcgtccggcagcaactcgcgtgatgttattaggctccggtgaactgggtaaagaagtggcaatcgagtgtcagcgtctcggcgtagaggtgattgccgtcgatcgctatgccgacgcaccagccatgcatgtcgcgcatcgctcccatgtcattaatatgcttgatggtgatgcattacgccgtgtggttgaactggaaaaaccacattatatcgtgccggagatcgaagctattgccaccgatatgctgatccaacttgaagaggaaggactgaatgttgtcccctgcgctcgcgcaacgaaattaacgatgaatcgcgagggtatccgtcgcctggcggcagaagagctgcagctgcccacttccacttatcgttttgccgatagcgaaagccttttccgcgaggcggttgctgacattggctatccctgcattgtaaaaccggtgatgagctcttccggcaaggggcagacgtttattcgttctgcagagcaacttgctcaggcatggaagtacgctcagcaaggcggtcgcgccggagcgggccgcgtaattgttgaaggcgtcgttaagtttgacttcgaaattaccctgctaaccgtcagcgcggtggatggcgtccatttctgtgcaccagtaggtcatcgccaggaagatggcgactaccgtgaatcctggcaaccacagcaaatgagcccgcttgcccttgaacgtgcgcaggagattgcccgtaaagtggtgctggcactgggcggttatgggttgtttggtgtcgagctatttgtctgtggtgatgaggtgattttcagtgaggtctcccctcgtccacatgataccgggatggtgacgttaatttctcaagatctcagtgagtttgccctgcatgtacgtgccttcctcggacttccggttggcgggatccgtcagtatggtcctgcagcttctgccgttattctgccacaactgaccagtcagaatgtcacgtttgataatgtgcagaatgccgtaggcgcagatttgcagattcgtttatttggtaagccggaaattgatggcagccgtcgtctgggggtggcactggctactgcagagagtgttgttgacgccattgaacgcgcgaagcacgccgccggacaggtaaaagtacagggttaaacccggcaaaaaaacgctacaaaaatgcccgatcctcgatcgggcattttgacttttacagcttagcgccttctacagcttcacgcgccagcttagtaatgcggtcgtaatcgcccgcttccagcgcatctgccggaaccagccaggaaccaccgatgcacagcacgcttttcagcgccaggtagtcacggtagttagccggagaaataccacccgtcgggcagaaacggacctgggagaacggacccgcgatcgcctgcagggctttcacgccgccgttagcttcagccgggaagaatttgaactctttcaaaccgtagtccatacccagcatcagttcggaaacagtgctgatccccggaatcagaggaatagtcccttcggtagcagctttcagcagcggctcggtcagacccgggctaattgcgaactgtgcacccgcttcagtgacttctgccagctgctgtggattcagcaccgtaccggcacccacaatcgcttcaggcacttctttggcgatagcacggatagcgtcaactgcacactcggtacgcagagtcacttccagaacgcgcaccccaccagcaaccaacgcttttgccatcggcaccgcgtgttccagtttttttaccacgataaccggtacaaccgggccggtggtcaggatactttctgcacttgttttccagtttttcatcagagttttctctcgcctgattacaaatttgtcgtcttaaaaagtgatacaggttgcgccctgttcggcaccggacagtttttcacgcaaggcgctgaataattcacgtcctgttcccacgcgactcgcgctcaggtcaggaatgtgcggttcgcgagcagccagttccgcttcgtctaccagcagcgtcagttcgcctgtctgtccattcacacgaatgatgtccccgtcgcgcacttttgccagcagcccgccatcgtaggcttctggtgttacgtggatagcactcggcactttaccactagcgccggagagtcgtccatcggtaactaacgcaattttgaaacaccggtccaataatacaccaagtggcggcatgagtttatgtaattctggcattccgttcgcttttggcccctgatgacggacaacaacgacacaatcgcggtccagcaaacccgcttcaaaggccggcataacgtcatgctggctttcaaaaacaaccgctggcgcttcaatcacctggttctcaaccggcacggcagaggttttcataaccgcacggcccaggttaccgcttaacacttttgtcccaccatgatgagagaaaggttgttcgaaggaagcgatcacattgctgtcgagacttttttccgccccttcccgccagtccagttcaccattattcagccatggttcaagggtataacgagacagaccaaaacctgccaccgtattgacatcttcatgcagcaggcctgctttgagcagttcacgcaccagaaccggtacgccacctgccgcctggaagtggttaatatcggccggaccgttcgggtagagacgtgccatcagcggtacaacatcagaaaggtcagagaagtcatcccagttaatctgaataccggccgcgcgcgccatcgccaccaggtgcatggtgtggttagtggaaccaccggtcgccagcagtgcaacgataccgttcaccaccactttctcatcgatcatcttaccgatcggcatccattcattaccattaccggtcatgcgtgtaacctgacgcgcagctgcggcggtcaaagcatcgcgcagcggagaatccggatgaacaaaagaagagcctggcaactgcatccccataaactccaccaccatctggttggtgttggcagtaccgtagaaagtacatgttcccggcgcatggtaagacgcggcttcactctccagtaaggccatgcggtccactttaccttcggcataaagctggcgaatacgcactttttctttatttggcaaaccgcttgccatcggtccagacggcacaaacaccgcaggcaaatgaccaaagctcagggctgccatcgtcagacccgggacaatcttgtcgcacacaccgaggaacagagcaccatcaaacatgttatgggacagccccaccgccgcagacatcgctatcacttcgcggcttagcaggctcaattccattccatcctgcccctgggtgacaccatcacacatcgccggaacaccgcccgcaacctgaccaaccgcattcgcttcatgcagggctttacgaatgatttctggatagtgttcataaggctggtgcgcggagagcatgtcgttataggaggtgatgatggcgatattgttacgcaacatgcttttcaaagaggctttgtcttctggctggcaggcagcgaaaccgtgtgccaggttaccgcatgccaactggctacgatgaacggtgctagttttcgcttgttctatccgggcgagataagcagagcgagtctcgcggctacgttcaatgattcgatttgttacgcgtaacaattgtggattcataaaggctcctgaaattgagttgtcagagcaggatgattcacaacgcgtttcattcagaggatttatgactgaaacgcctgtaaccggagctcatagggcaaaaacgtttcagtcagtgtaataaaaaaagcctcgtgggtgaatccgcacgaggcctgaaagtgtaaaaattgttctacaatctgcgcaagatcatgttaccggtaaaataaccataaaggataagcgcagatattactcaaactcattccaggaacgaccatcacgggtaatcatcgccacgctggcaacgggtccccaggttccggcctgatacggtttcggcgcatcattgtccatcgcccacgcctcagtaatggagtctacccatttccaggcttcttccacttcgtcgcgacgtacaaacagtgcctgaataccacgcatggtttccagcagcaaacgttcataggcatccgccagatgcgtctgattaaaggtttcactatagctcagatccagcttggtgatttgcaggttatgtttgtggtcaaggccaggaactttattcagtacctggatatccacgccttcatcaggttgcagacggatagtcagtttattctgcggcagatcctgccagctttctttaaacagattcagttcaggtgttttgaaatagaccacgacttcagaacatttggtcggcagacgtttaccagtacgcaggtagaatggcacaccggcccagcgccagttatcaatgtcgacgcggatcgccacgaaagtttctgtattgctgctcttgttcgcgccctcttcttccagatatcccggcacttttttgccctgggcgaagcccgcagtatattgcccgcgtacggttttttcgcgtacgttggagcggtcgatgcggcgcagagacttcagtactttcactttttcatcgcggatgctgtctgcgctcaggtcagacggcggagacatcgcaatcatgcaaagaatttgcagcaggtggttctggatcatgtcgcgcatctgaccggctttatcaaaatagccccagcgcccttcgatccccacttcttctgccacggtaatctcaacatgatcaatggtgcgattgtcccagttattcacaaacagggagttagcaaaacgcagcgccaacaggttcagcaccgtttctttaccaagatagtggtcgatacggtaaacctggcactcctcgaagtattcgccaacctgatcattgatttcctggctggtcgccaggctcgtccccagcggtttctccatgactacgcgtgccggtttagcattcagttttgcctcgccaagccctttgcaaattgcgccaaaagtgctgggcggcatggcaaagtagttaatggtgatacgatttttttgatccagcatcgcgccgagacggctgaatgcagcagtgtcattgacatcgagattacaaaaatccagacgtgcactcagggtgtcccataaaccttcatcaatggtttctttcatgaaagtttcgagcgcctcgcggacaactttggtatatgccgctttatcccagtcagcacgccctacgccgataatccgggtgtccgggttgagctgaccggctttttccagttgatacagggaaggcagcaatttacgacgcgcaaggtcgcctttcgcgccgaaaatgaccaggtcacaggcctgggctgtttgcgttaccgccatgtcattctccttaagttaactaacccggtacttaagccagggtatacttgtaattttcttacggtgcactgtactgcttttacgagcttgcgaaaactgtaaacgcttatccacccgtgcgattacgggaaaagcgcgcaaagtgcggcaaaactgataaaaaaatcatcgttttccattgggtaaaaatctgacactgatcatgttatgaaaaaaaataacaacttttttatctgcttttgtcattaacacggcacacaggcgtaatatctgacaaaactgcatttcgatttctttcagtgcggaaatcgtcattacccgtgagtctctttacatcatgaatatgctggaaaaaatccagtctcagctggaacatttgagcaaaagtgagcgcaaagttgccgaggtcattctggctagccccgataacgcgatccatagcagtattgctgctatggcactggaagccaatgttagcgaaccgacggtgaatcgtttctgtcgcagcatggacacgcgcggttttcctgattttaaacttcatctggcacagagtctggcgaatggcactccctatgttaatcgcaatgtcaatgaagatgacagcgttgaaagttacacagggaaaatatttgagtccgcaatggcaacgcttgatcatgtccgtcatagtctggataaatctgccatcaaccgcgccgtcgacttgctcactcaggcaaaaaaaatcgcctttttcggattaggctctagtgccgccgttgcccacgatgcgatgaataagttctttcgttttaatgttccggtggtgtactccgatgatatcgtgctgcaacgcatgagttgtatgaattgtagcgacggagacgtggtggtgctgatttctcacactggaagaacaaaaaatctggtcgagctggcgcagctggcacgcgaaaacgacgccatggtgattgccctcacctctgcgggtaccccgctcgcccgggaagcaacgctggcaattaccctcgacgtaccggaagatactgacatttatatgcccatggtttctcgacttgcacagctgaccgtgatagatgtgctggcgacaggatttactttgcgacgcggtgcaaaattcagagataacttgaagcgggtcaaagaagcgctgaaggaaagccgttttgataagcagttacttaatttaagtgacgatcgctaaaaacgactgtcactgtcctaatcttatacgacatccgaatgagattaatttatcgccatcgcggcgttatttcattcggatttcatgttcaagcaacacctggttgtttcagtcaacggagtattacatgtccagaaggcttcgcagaacaaaaatcgttaccacgttaggcccagcaacagatcgcgataataatcttgaaaaagttatcgcggcgggtgccaacgttgtacgtatgaacttttctcacggcagccctgaagatcacaaaatgcgcgcggataaagttcgtgagattgccgcaaaactggggcgtcatgtggctattctgggtgacctccaggggcccaaaatccgtgtatccacctttaaagaaggcaaagttttcctcaatattggggataaattcctgctcgacgccaacctgggtaaaggtgaaggcgacaaagaaaaagtcggtatcgactacaaaggcctgcctgctgacgtcgtgcctggtgacatcctgctgctggacgatggtcgcgtccagttaaaagtactggaagttcagggcatgaaagtgttcaccgaagtcaccgtcggtggtcccctctccaacaataaaggtatcaacaaacttggcggcggtttgagcgctgaagcgctgaccgaaaaagacaaagcagacattaagactgcggcgttgattggcgtagattacctggctgtctccttcccacgctgtggcgaagatctgaactatgcccgtcgcctggcacgcgatgcaggatgtgatgcgaaaattgttgccaaggttgaacgtgcggaagccgtttgcagccaggatgcaatggatgacatcatcctcgcctctgacgtggtaatggttgcacgtggcgacctcggtgtggaaattggcgacccggaactggtcggcattcagaaagcgttgatccgtcgtgcgcgtcagctaaaccgagcggtaatcacggcgacccagatgatggagagtatgattactaacccgatgccgacgcgtgcagaagtcatggacgtagcaaacgccgttctggatggtactgacgctgtgatgctgtctgcagaaactgccgctgggcagtatccgagtgaaaccgttgcagccatggcgcgcgtttgcctgggtgcggaaaaaatcccgagcatcaacgtttctaaacaccgtctggacgttcagttcgacaatgtggaagaagctattgccatgagtgcaatgtacgcagctaaccacctgaaaggcgttacggcgatcatcaccatgaccgaaagcggtcgtaccgcgctgatgacctcccgtatcagctctggtctgccaattttcgccatgagccgccatgaacgtacgctgaacctgactgctctctatcgtggcgttacgccggtgcactttgatagcgctaatgacggcgtagcagctgccagcgaagcggttaatctgctgcgcgataaaggttacttgatgtctggtgacctggtgattgtcacccagggcgacgtgatgagtaccgtgggttctactaataccacgcgtattttaacggtagagtaagtacgttgccggatgcggcgaaaacgccacatccggcctacagttcaatgatagttcaacagatttcgaatattctgaagcaaacttgaacttatcatcaggcgaaggcctctcctcgcgagaggcttttttatttgatgggataaagatctttgcgcttatacggctggatttcgcccggtttgcgagttttcagcaattttagtatccaggtgtattgttctggtcgcggaccaacaaaaatctcgacttcttcattcatccgccgcgcaatcgtatgatcatccgcctctaacagatcatccatcggtgggcgcacctgaatcgtcagacgatgcgtcttgccatcataaatcggaaacagcggtacaacgcgcgcacggcacactttcatcaaacgaccaatcgcgggcaacgtcgctttataggtggcaaagaaatccacaaattcgctgtgctctgggccatgatcctgatcgggtaaataatatccccagtacccctgacgtacgctctggatgaatggtttaataccgtcatttctcgcatgcagacgaccgccaaagcgacgacgcaccgtgttccagacataatcaaaaaccgggttgccctgattatggaacatcgctgccattttctgcccttggctggccatcagcatggcaggaatatcgacggcccaaccgtgcggcaccagaaagataactttctcgttattacgccgcatctcttcgatgatctccagcccttgccagtcaacgcgcggctgaattttctccggcccgcgtattgccaactcagccatcattgccatcgcttgcggcgcggtggcaaacatctcatcaacaatcgcttcgcgttcagcttcactacgttctggaaagcagaggctcagattgattaacgcacgacggcgactgctttttcccagtcgtccggcaaaacgtcccagccgtgccagaatgggatcacggaactttggcggcgttaaagcgatacccgccatcgctgctacgcccagccatgctccccagtagcgcgggtggcgaaaggatttatcaaactcaggaatgtattcgctattattttttttcgtttccatgcttttccagtttcggataaggcaaaaatcaatctggtgatagtgtagcggcgcaacttgccccgcaccaaataaaaaaagccggtactgactgcgtaccggctgcgaatggatgttaattaatcaaaccgtagctgcggcacaatctctttggcctgcgccaggaattcgcgacgatcggagccggtcagcccttcggtacgcggcagttttgccgtcagcgggtttacggcctgctggtttatccatacttcatagtgcagatgcggcccggtactacgtccggtattaccggaaagcgcgatacggtcgccacgtttcaccttctgtcccggtttcaccagaatcttgcgcaagtgcatataacgcgtggtgtagctgcgaccatgacgaatagccacataataacctgctgcgccactgcgtttggcaaccaccacttcaccgtcacccacactaagcactggcgtaccctgcggcatggcgaaatcaacacctctgtgtggtgcaacgcgaccggtcaccggattagtacgacgcgggttaaaattagagctgatacggaactgtttcgccgtcgggaatcgcaagaatcctttcgccagaccagtaccgttacgatcgtagaatttgccatcttcagcgcggatagcgtaataatctttaccttcactacgcaaacgtacgcccagcagctggctttgctcacgtttaccatcaagcatttctcgagacattaacaccgcaaattcatcgccttttttcagtttgcggaaatccatttgccactgcatggctttaatcactgcgctcacttcggcgctggttaaaccggcgtttctggcgctggcaacaaagcttcccccgacggtacctttcagcagattgttaacccactctccttgctgcatttcgctggtcattttaaaaccgttagcggcagtacggtcataggttcgggtttcacgacgagacacttcccaggtgaggcgctgcagttcgccgtccgcggttaatgtccaggagagttgttgaccgattttcaggttacgcaattctttgtcggccgcagccagttgggtgatatcacccatatcaataccatactgattgagaatgctgcttagcgtatcgccagtggaaacaacatattcatgcacgcccgcttcaccggcgattttgtcatccagttcgtcctggggaatggcttcatcttcttgtgcagcttgatcaatcggctcactggcttcaggtaagaggctacgaatttcgttctgttccagctcaatggttttgacaattggcgtggcatcacggtgataaacataaggccgccagacagcgacggccagagtaagaacggtgaggctccccaacataacgcggtgtggtcgcggtaaattattaaacgccagggcgacagagcgggctatctgttgcacgtaatcacttcctcattaatctcctttcaggcagctcgcatactggttggctaattgactcaggaattcactatagcttgttttacccagtttgatattcgtccccaggggatccaacgttcccatacgaacggatgtccctcgtgcgacgctctcaacgaccgctggcctgaactgtggctcagcaaaaacgcaggttgctttttgctcaaccaactgtgttcttatttcatgtaaacgctgcgcgccaggttgaatctcagggttaacggtaaaatgaccaagcggtgtcagtccaaactgtttttcgaaatagccgtaagcatcgtgaaaaacgaaataacctttccccttgagcggcgcgagctcgttaccaacctgcgtttcggtactggctaattgtgcctcaaaatccttcaggttggcgtcaagtttggctcgactttgcggcataagttccactaattttccatggattgcaaccgctgtagcccgcgctatctctggggaaagccaaagatgcatgttgaaatcgccgtgatggtgatcttcgtcacttttttccgcgtggtcgtgatcatcatcatcgccgtgaatacttttcatcagtagcggtttcacatcttcaagctgcgcaatcgttacctgcttcgctcctggtaatttgcttaccggtttttgcataaacgcttccatctccgggccaacccaaacgactaagtccgcgttctgtaagcgttttacatcgcttgggcgcagactataatcatgttcactagcgccgtcaggaagtaaaacctctgtttctgttaccccatcagcaatggcagaagcgatgaacccaacgggtttaaggctagcgacaacggcggcatctgcggcctgtgttgcacctccccagagagcggcggataatgctgcgaaaagaagcgtttttttatgtaacataatgcgaccaataatcgtaatgaatatgagaagtgtgatattataacatttcatgactactgcaagactaaaattaacatgacaagtctggtttccctggaaaatgtcagcgtttcttttggccaacgccgcgtcctctctgatgtgagcctggaacttaaacctggaaaaattttgactttacttgggccaaatggcgcaggtaagagcacactggtacgggtagtgctcgggctggtaacacccgatgaaggggttatcaagcgcaacggaaaactgcgcatcggctatgtaccgcagaagctgtatctcgacaccacgttgccactgaccgtaaaccgttttttacgcttacgccctggtacacataaagaagatattttgcctgcactgaaacgtgtccaggccgggcacctgattaacgcaccgatgcaaaagctctctggtggcgaaacgcagcgtgtactattagcgcgagcattgttaaatcgcccgcaattattagtgctggatgaacccactcaaggcgtggatgtaaatggccaggtggcgttatatgaccttattgaccaactgcgtcgtgaactggattgtggcgttttaatggtttctcacgatctgcatctggtgatggcaaaaaccgatgaagtgctgtgcctgaatcaccacatttgttgttccggcacaccggaagttgtttccctgcatccggagtttattagtatgtttggtcctcgtggtgctgaacaactgggtatctatcgccatcatcataaccatcgtcacgatttacagggacgaattgttttgcgtcggggaaatgatcgcagttgatttaacgtcggggaaatgatcgctcatgattgaattattatttcccggttggttagccgggatcatgctcgcctgtgccgcgggtccgctgggtagctttgtagtctggcgtcgtatgtcttatttcggtgatacgctggctcatgccagtttacttggcgtcgcgtttggtttgttgctggacgtgaatccattctatgcggtgattgccgttacgctgctgctggcgggcggtctggtatggctggagaagcgtccacagctggcgatcgacacgttattagggattatggcgcacagtgccctgagcctgggcctggtggtcgtgagtctgatgtctaatattcgtgttgatttgatggcttacctgttcggtgatttgctggcagtgacgccagaagatctcatctctattgcgattggcgtggtcatcgtggtggctattttgttctggcaatggcgcaatttgctgagtatgacgataagcccggatctggcgtttgttgatggtgtgaaattacagcgagtgaaattgttgttgatgctggtgacggcattgacgattggtgtagcgatgaaatttgtcggtgcgttgattattactagcttgctgattattcctgctactactgcgcgtcgctttgcccgcacgccggaacagatggctggtgtcgctgttttggtggggatggtggcagtgactggcggtttaaccttttccgcggtttacgatacgccggcgggtccgagcgtggtgctatgtgcggcactgttatttattctcagtatgatgaaaaagcaggccagctaatctatcgctgaacacatttgtcggatgcggcgcgagcgccttatccgacctacggttcggtatctctggtagtcctggtaagacgcgaacagcgtcgcatcaggcatattgccagtgccggatgcggcgcgagcgaccaatccgacttacggcatttctggcggcgttatgccaaagtgattccacgcccgcgtcgtcgccatacgcccacgcggtgtacgctgcaaaaagccttgctgaatcaaataaggttccagcacatcctcaatggtttcacgttcttcgccaatggctgccgccaggttatccagacctacaggtccaccaaagaacttatcgattaccgccagcaacaatttgcggtccatataatcgaaaccttcagcatcgacattcaacatatccagcgcctgagcagcgatatctgcgctgatggtgccatcgtgcttcacttcggcgaaatcacgcactcgacgcagcagacggttggcaatgcgcggcgtaccgcgagcgcgacgagcaacttccagcgcgccgtcatcactcatctcaagccccataaagcgtgcgctgcgactgacgatatattgcagatccggcacctgataaaactccagacgttgcacaataccaaaacggtcgcgcaacggacttgtcaggctacctgcgcgcgtggttgcaccaatcagggtaaacggcggcaaatcaattttaatggagcgtgccgccggaccttcaccaatcatgatatccagttggtagtcttccattgccgggtacagcacttcttcaacaactgggcttagacggtggatctcatcaataaacagcacgtcatgcggttcaaggttagtgagcatcgcagccaaatcgcccgccttttccagcaccggaccagaagtcgtgcgtaaattaacgcccatttcattggcgacaatgttggcaagcgtagttttacccaaccccggaggaccaaaaatcaacaaatgatcgagggcatcgccgcgcagtttcgctgctttgatgaaaatctccatctgactacgaacctgcggctgaccaacatactcttccagtaatttggggcgaatggcgcgatctgctacatcttccggcaaagtggtaccggcagaaatcagacggtctgcttcaatcatcctttacctcataacgcggcgcgtagggcttcgcgaattaaagtttcactgctggcgtcagggcgagcgattttgctcaccatgcggcttgcttcttgtggtttatagcccagcgccaccagcgcggcaaccgcttcttgttcagcatcgtcggtcgccgggctggcaggagacgtgagtaccaggtcggcggctggcgtaaagagatcgccatgcaaacctttaaatcggtctttcatttcaacaatcaagcgttcggcggtttttttgccaatacccggcagtttcaccagtgcccccacttcttcacgctcaacggcattaacgaactgctgcgcactcattccggagaggatcgccagcgccaacttcgggccgacgccgttggttttgatcaactctttgaacaatgtgcgctcttgtttattgttaaaaccgtacagcagttgcgcgtcttcacgcaccacaaagtgggtgaaaacgatcgcttcctgacccgcttcagggagttcataaaaacaggtcatcggcatatgcacttcatagcctacgccgcccacttcaattaacaccagcgggggttgtttttcaatgatgatgcctctgagtctgcctatcacatgacgctcctgcgtaatgaatcaaagataatgctgtatgataaaaaaatgctggatagatatccagcgaaggatgaagaaaacttgcgaggtgtctcgatgaactgaaaaatggcacagtataatttattctacaggttatattggaagcaaatattttaatattacatattcagtgaagaaatgcgtaataaaaatatacattgcgcctcctgaaaaaataaattttttatgctattacgtatatttgtatctatttcaatggaatgacaacgtgaatattaattaccctgctgaatatgaaattggagatatcgtctttacatgtataggtgctgccttatttggtcaaataagtgctgcaagtaattgctggagtaatcacgtcgggatcattatcggtcataacggtgaagacttcctggttgcagaaagccgggttccccttagtaccatcaccacgctatctcgttttattaaacgtagctctaatcaacgctatgctataaagcgattagacgctgggctgacagaacgacaaaaacaacgaattgttgaacaggttccctcccggctacgcaaactttaccacaccggttttaaatacgaatctagccgccagttctgtagtaaatttgtttttgatatttataaagaagcgctatgtattccggtgggtgaaatagagacgtttggagaattgttaaatagcaatccgaatgcaaaactcactttctggaaattctggttcctgggttctattccgtgggagcgtaaaaccgtcacgccagccagtttgtggcatcatccgggtttggtgttgattcatgcggagggagtggaaacgcctcagccggaactgaccgaggcggtataacttaacgcagtcgccctctcgccaggttcagccggctttcgctcatctgcatcgcattctgactaacgtggcagtgggtgatagcaatcgccagcgcatcggcggcatccgcctgtggattagcgggcagtttcagcaaggtgcggaccatatgctgcacctggcttttttcggcactgccaatacctaccaccgtttgctttacctgacgtgccgcgtattcaaatactggcaactcctgattcaccgccgccacaatcgccacgccgcgcgcctggcccagtttcagggcactgtcagcgttctttgccataaagacttgttcaatggcgaaataatcaggctggaactgggtgatgatttccgtcacgcccgcatagatgagtttcagacgagacggtaaatcatccactttggtgtggatgcatccgctacccaggtaggacagttgcctacctacctggcggatgacgccgtagccggtcacgcggctacccggatcaatgccgagaataatagccatcacgcgtctccgttttgctgtttagcaggcctcatcagagagtcgctgcgacctcatcagagatttcaccgttatggtaaacttcctgcacgtcgtcgcaatcttccagcatatcgatcagacgcatcagtttcggtgcggtttctgcatccatatcagctttggtagacgggatcatggaaacttccgcgctgtctgctttcagacctgccgcttccagagcgtcgcgcactttacccatttcttcccatgcagtgtagacatcaatcgcgccgtcatcataggtcacaacgtcttcagcacctgcttccagtgctgcttccatgatggtgtcttcatcgcctttctcgaaggagatcacgccttttttgctgaacagataggcaacggaaccatcagtaccgaggttaccgccacatttgctaaatgcatgacgcacttcagcaacggtacggttgcggttgtcagacagacattcaatcatgattgccgtgccgccaggaccgtaaccttcgtagatgatggtttccatgtttgcatcatcatcaccgcccacaccacgtgcaattgcgcggttcagtgtgtcacgggtcatgttgttagacagtgctttatccaccgccgcacgcagacgcgggttagcgtccggatcgccaccgcccagcttagccgcggttaccagctcacgaatgattttagtgaagattttaccgcgcttagcatcctgcgcagctttacgatgtctggtgttggcccatttactatgacctgccataaaaatatctccagatagccctgcctgttcaggcagcgttaattacaaactgttcaatcgcctgccggttgctccaggacttagtgagcgccgccgcagcaggcgcatcaagccacttgtaagccagatgttcagtgaaaacgatctgccgctcgtgcggaagcgcaagacagaaccaactttccgtattacgcgtcacgcccggcgcatagcgatgacgtaaatgactaaaaatttcaaactctaccgtgcgctgacagtcaattaaggtcagttgttcagcgacaacatcaatggtgacctcttcctttacttcgcgcatggcagcttgcggcgcggtttcaccctcttccacgctgccggttacgctctgccagaaatcgggatcgtcacgccgctgcaacatcagcacccgtttcgtatcttgtgcgtagatgaccactaagatgctaacgggacgcttatacactttatccttcacgctgcctcttcgttgactgccttcgctcatcccattcacatagttatctatgctcatgggagttcactcagttgccgcctcgatgcaacgcgaatgatttcgtgtatttgagtcatatcagttattctcagccttcttcacaacctgaatgctcagctcagccagtgcagtcgggttagcaaagctcggtgcttcagtcatcagacacgctgccgccgtggttttcgggaaggcgataacgtcacggatattgtcggtgccggtcagcagcatggtcagacggtcaagaccgaatgccagacctgcgtgcggcggagtaccgtatttcagagcgtcgagcaggaagccgaatttctcgcgctgttcctcttcgttgatacccagaataccaaacaccgtctgctgcatatcaccattatggatacgtacactaccaccgcccacttcgtaaccattgatgaccatatcgtaagcgttcgccaccgcattttccggtgcagctttcagttctgcagccgtcatatctttcggactggtgaacggatggtgcattgccgtcaggccgccttcaccgtcgtcttcaaacatcgggaagtcgataacccacagcggtgcccatttgctttcgtcggtcagaccaaggtctttacccactttcaggcgcagtgcacccatcgcgtcggcaacaattttcttgttgtcggcaccgaagaaaatcatatcgccatcttgcgcggcagtacgatccaggatgtcttcgatgatttctgcattaaggaacttcgctaccgggctgttgataccttccagacctttcgcgcgttcgttaactttgatgtaagccagacctttcgcgccgtagattttaacgaagttaccgtattcgtcgatctgcttacgggtcaggcttgcgccgcccggaacgcgcagagccgctacgcgacctttcggatcgttcgccggacctgcaaatacagcaaactcaacagatttcagcagatcagcaacgtcagtcagttccatcgggttacgcagatccggtttatcagaaccataacggcgttctgcttccgcaaaggtcattaccgggaaatcgcccagatccacacccttcacttccagccacagatgacgcaccagcgcttccatcacttcacgcacttgcggcgcggtcatgaaagaagtttccacatcgatctgagtaaattcaggctgacggtcagcacgcaggtcttcgtcacggaagcatttaacgatctgatagtaacggtcaaaaccggacatcatcagcagctgtttgaacaactgcggggattgcggcagtgcgtagaatttacctttgtgcacacgagaaggcaccaggtagtcacgcgcgccttccggcgtggctttggtcagcatcggagtttcgatgtcgaggaagccgtggtcatccataaaacggcgcaccaggctggtgattttagcgcgggttttcaggcgctgagccatttccggacgacgcaggtcgaggtagcggtatttcagacgcgcttcttcggtgttgacgtggttagagtcaagcggcagaacatctgcgcggttgatgatagtcaggctggacgccagcacttcgatttcgccggtcgccatatcgcggttaatatttttttcgtcacgcgcacgtacggtgcccgtgacctgaatgcagaactcattacgcagttcagaggccagctttaacgcgtccgcacgatccggatcgaaaaatacctgcacgataccttcgcggtcgcgcatatcgatgaagatcaggctaccaagatcacgacgacggttgacccaaccacacagagtcacctgctgccccacgtgggacaaacggagctgtccacaatattctgtacgcatgagatatcccttaacttagctgccggcggatgccccctgctgcgcaggtgaccaagtcgcagcgttagctgtatgtcacaactgaatgaaaaaaggcggctattatactggaaattctgccgcaccgtaagagcctggcccgcgctggaacgcctcgttaccactttatatcgggcctgaaatcagactctacgccagtttgctataaaggtgttgcccgaactcataaaaattaacaaaatttgtcgttccgccatcggctaatcgcattaaggtgtgaggcacgattttgttttttcaggagtcattatgcttgaacttaatgctaaaaccactgcgctggtggtgatcgatttacaagaaggcatcttaccttttgccggtggtccacatactgccgatgaggtagttaatcgcgccgggaagctggcggcgaaatttcgcgccagcggtcagcccgtgtttctggtgcgcgttggctggtctgccgattacgctgaagcattaaaacagccggtcgatgcgcccagtccggctaaagtgttgcccgaaaattggtggcaacatcctgctgcattaggtgcaaccgacagcgatatcgaaatcatcaaacgtcaatggggtgcgttttacggtacggatctggagttgcaattacgccgccgaggtatcgatacaatagtgttatgtgggatcagcaccaatatcggtgttgaatccaccgcccgcaatgcctgggaacttggctttaatctggtgattgccgaagacgcctgtagtgccgccagcgccgagcagcacaataacagtatcaaccatatctacccgcgcatcgcccgtgtgcgtagcgtggaagagatcctcaacgcgttatgatttacatcggtctaccgcaatggagccatcctaaatgggtgcggttggggatcaccagccttgaagagtatgcccgccactttaactgcgtggagggcaacaccacgctttacgccctgccgaaacccgaggttgtcctgcgctggcgtgagcagaccacagatgacttccgcttctgttttaagtttccggcgaccattagccatcaggcagcattacggcattgcgatgatttagtgactgaatttttgacccgcatgagtccgttggctccgcgcattgggcaatactggctgcaactgcctgccacattcggcccacgggagctgcctgcgctttggcattttctcgattctcttcctggcgaatttaattatggcgtggaagtccgccatccacagtttttcgccaaaggagaagaggaacaaacgcttaatcgcggtttacatcagcgcggcgttaatcgggtgattttagacagccgcccggttcatgcagcacgtccacacagtgaagctattcgcgacgctcaacgaaaaaaacctaaagttccggtacatgctgtactgacggcgacaaatccgctgatccgttttatcggtagtgatgatatgacgcaaaaccgggaattatttcaggtctggttacaaaaattagcgcagtggcatcagaccactacgccttatctttttttacatacgccagacattgcccaggcaccggaactggtacataccctgtgggaagacttacgtaaaacgcttccagagatcggagcagttccggctattccacagcaatcttctcttttctgaatttgccacctatcatagacaggtgccatcggccattttaaagggagtttgtatggtaagcgcgctgtacgccgttttaagtgcgttgttattaatgaagttctcttttgatgtcgttcgcctgcgaatgcagtaccgcgttgcctatggcgacggcggttttagcgaactgcaaagcgctattcgcattcatggtaacgcggtggaatatattcccatcgcgattgtgctgatgctgtttatggaaatgaatggcgcagaaacctggatggtgcatatttgcggcatcgttttgcttgctggtcgtctgatgcattattacggttttcatcaccgtctgttccgctggcgacgttccggcatgagcgccacctggtgtgcgctgttgctgatggtgctggcgaatctttggtatatgccctgggagttggttttctccctgcgttaacgcacaatacgccactttctttttcccggatttttacgttatgtctcaccgcgacacgctattttctgcccctatcgccagactgggcgactggacctttgatgaacgggtagctgaagtcttcccggatatgatccagcgttccgtacccggctattccaatattatttccatgattggtatgttagccgagcgcttcgttcaacctggtacgcaggtttacgatctgggttgttctctgggcgcggcgacgctcagcgtgcgtcgcaacattcatcatgataattgcaaaattattgccatcgacaactccccggcgatgattgaacgctgccgtcgtcatattgacgcctataaagcccctacgccagtagacgtcattgaaggtgatattcgcgatatcgccattgaaaacgcaagcatggtggtgctgaattttaccctgcaattcctggaaccttccgagcgccaggcgttactggataaaatttatcaagggctgaaccccggcggcgcgctggtgcttagcgaaaaattcagtttcgaagatgccaaagttggtgaactgttgttcaacatgcaccacgactttaaacgtgccaacggttacagcgaactggagatcagccagaagcgcagcatgctggaaaacgtgatgctgaccgattccgtggaaacccataaagcacgcctgcataacgccggttttgagcatagtgagctgtggttccagtgctttaactttggtagtctggtggcattaaaagcagaggacgctgcatgatcgactttggtaacttttattctctgattgccaaaaatcatcttagtcactggctcgaaacgctgcccgcgcagattgctaactggcagcgcgagcagcagcacgggttgtttaagcagtggagtaatgcggtggagtttctacctgaaattaaaccgtatcgtcttgatttattgcatagcgttacggcagaaagcgaagagccactgagcgcagggcaaattaaacgcattgaaacgctgatgcgcaacctgatgccgtggcgcaaagggccgttcagtctgtatggcgtcaacatcgataccgaatggcgttccgactggaaatgggatcgtgttctgccccatctttctgatttaaccggacgcaccattctggatgtcggctgcggcagcggttatcacatgtggcgcatgattggcgcaggcgcgcacctcgcggtggggatcgaccctacgcaactgtttctgtgccagtttgaagcggtgcgtaaactactgggtaatgatcagcgcgcgcatttgttaccgttaggtattgaacaacttccggcactgaaagcctttgataccgtctttagcatgggcgtgctttaccatcgccgtagtccgctggagcatctatggcagttgaaagatcaactggtcaatgaaggtgaactggtgctggaaacgctggttattgatggtgatgagaacacggtgctggtaccaggcgatcgttacgcgcaaatgcgtaatgtctatttcatcccttccgcgctggcgctgaaaaactggctgaagaagtgtggttttgtagatatccgcattgcggatgtgagcgttaccaccacagaagagcagcgacgcaccgaatggatggttaccgaaagcctggccgatttcctcgacccacatgatccgggtaaaacggtggaaggttatccggcacctaaacgcgcggtgctgattgcgcgcaagccgtaaaggtctggtattactgccggatgcggcgtgaacgccttatccggcctacaaaaccttgctaattcaatatattgcagggactatgtaggcctgataagcatagcgcatcaggcagctttacgtttgcataacctcagcgcccgtttccgggcgctattcacgtcttacgcctgaacagctggctgatcaaacgccgttaacttcggtgcattgcccgtatatttttcgatatacaccaacgcactgttaccggcacaggcatttgccagctggctgctggggatatccgccgttaacacgttcgcactgccgtttttacacaagccattttccagatctggccatgcaccttcatgcacgcataccacgccttttttgatcccgtcagtcaccaccgcgcctgtcaaaatctgaccacgtttgttccagacacgcaccagatcgccattcgcaataccaaagcgtgcagcatcttcggtgtgaatagtgattggttcacgatcggcgatcgcatattttttacgcagttccgcatagttaagctgactgtgtaaacggtgtgccggatgtgcggtcagaagctgtaactgcttctcgtcggcggtacctttccattcatcaggagccagccaggttgggtgtgccgggcaatccttatagccaaatttttccaacgttttactatagatttcaattttgccgcttggcgtacccagcgcatttttcaccggatcggcgcggaaatcaccataacgaacgtactgttcgttcttctcgctgtggcgcatttcgatcagtttattttgctgccagaaggcattaaacattggcatagtgacgcgttgcgcacgggcacctttctgagcggcatcatagaaaaatttcagccacgccatttcatctttaccttcggtatagatctcttttccgccaggtttgagtaattccgcaagatcggcaaacacgtcaaaatcgttacgcgcttcaaattgcggagcaacagcctgcttcatcggcacaatatgctggttgctgtaatcaccggtcatcgtcaagtcattgcgctcaaagcttgtggtgatcggtaatacgatatctgcgtgtttggctgctgcggtccagtagcattcagaaacgacgatcatctccggtttctgccatgctttaatcagacgattagtatcctggtgatgggtaaagttaccgccacccgcccaccagatcattttgatattcggatacgtttgttctttaccgttatgctgatatttgccgccaggattttccagcgcatcgacgatacgggcaacaggaatcgccgtcattccgccatcatcagcggcctcgctggcatgtccggcaatcgccgcagacatttccggcagcacgccgccaacacgcgtcgggttgccaccgttggagtaatgataagagaaaccaaaaccgccgcccggtgtaccaatctgccctaacatcgccgccagcgtcaccagcatccagtgtttctgttcaccatattgctggcgctgaattccccagcctgccatcagcattgtgcgattcgccgccatcagttcagcgagtttgactatctgcgcttccggtacgccagtaatttccgccgcccagaccgcgctcttcggcgtattatcgctcttacctgtcagatactcttcaaactgcggatacccggtagtgtatttttcaaggaacactttatcgtgtttgccttgtgtcatcagggtatgcgcaatccctaacatcagtgccacgtcggtgcccatattcggcgcgatccaggtggcattatcgtcaaagaattcgatggtttcggagcggataggatcaatggcaatcactggtttgccagattttttcagctgatggaagtattccagcccttgctcatcggtactgctccaggcaatttttaaggtattcagcgggttcattccccacagcaccacaacctggctgttttccagaatcagcggccaggaggtctgctgttcatacacctctacagaaccgaccacatgcggcatgatcacctgtgctgccccggtactataatcgccgctatgcccggaataaccgcccgccaggttcatataacgttgcagtaaggtttgcgctttatgcaacacgccagaagagcgccagccgtaagatccggcaaaaatggcgcttggtccgttagctttacgaatacgatcatgttgctcatgaatcagttttaatgcctgttcccagctcacctgtacataggtatcttcgccacgacctttcgccggttgcagtggattatcgagatagctttttctcaccatcggatgctgaatacgcgccgtggtgtgtacctgatccgccgccgtagactgtaaggaattcggtatggttttcgccagcgcgcctgtactagaaacaatcttgccgtccttcacttctacgttcatcgctccccaacgtcccgcggtgaggattttaccgcccttctcttctgcccatgcggggagcggtgctgcgcttgtcaccaccagcgctccagcggcaataccgctgtgtttaataaattcacgtcttgttaatgtcataacttcctccctgatcaacgaggatcactgtttctcggtaatatctttggcgttgtactggaaataccgcgttaaaatgtccagttcgttttcgctcatgctggttcgtgcccccattcctttggcaatggacggccacgcattgacggtgtaatggtcggcggcaataggggcatgacaaccagcgcaataggtatcgtcaagtttttcagcgtattgccatagcggtttacggtccgctaatgcgggatcggtaagcgcaccctgtaaagacgcctgacgccattgattgccgtattcgtcagcctgccattccccgtttacagtgagcgccttgataccttcttcacttaatgtggctagcgccagccgttgacctgccgccaggtagagcgtgttttcactgccctgcatttgataaccctgcaacagaacgatcggctgtttgccactggcatcaacgacggtgagatcggttccaggattcacggtagccagctcgcctatgtgagaagttttgaaaggataaatatgtgcgccattagtaacactagtagcggcctgactttccagctcatgcgccgcgttgtcatccatttttatttctggcggaaaatgggcaatgcctttatgacaatcgatacaggtttcgctgtccttttgtgctttgttatgcattttctgcgcagattcactttggctggcaatatccatggcatcaaaagaatggcaactacggcacgttgcagagtcagtggcttttaattctttccatactgtttcggccatttcctggcgatgagcttcgaacttatcgtcactgtctattttgccgctaacaaattcatgataaatatctttagatgcctttaatttagcaaataaataatccatcccactctttggaatatggcaatcggcacattccgcacgtatccctttctggttgctaaagtggacagttccctgatattcctcaaaaggtttactcatgctgtggcaggaaaggcaaaatgctgtatcgctcgttttatgtaagactttttgcgccagcaataacccgccgccaccaaccacaaccgctatcagcaaaaacaataacccaatgcgttttttccctcgcatagattcctctaattaaattactggacaccgaaatcattgtataattaaatatacaacgaattaaccgcttgcataattaggcacaacactgcctgaaacaatcgataaagaatatgatttattacaatgtaatcattaattgctaaggaataacccagttgctatttagaatatatatttatcagttttagtaatttaaatcccataattaatgtgaatatatacaatatttttagcacaacgctatgcgcactgtcacccgctcaacagatcacggttatcgttcgttttttatactgttcagggataaaaaaaggcccctgttgaaattgcaggggcctggtacgagcaagcatcatattgggcgacatgatgcaacggtaaaaatcatttggcctgatggcgttcaatgattcctttcatttcagcaaccgccgccccgtctacgatataacggctatactcgtccgcgtgttcatcactactcatggacaatccttgattacgataacgcatcggactggcttgccacgctcccgcggagctatggacttccagcactccggcatcgaggaagtggtgcaggttttctgcacggactcctgctccggccataatgattggagcatcacgatgggcaataagttccataattttacttaaaccttgcagtgcgtcacttttttgcccacttgtcagtacccgggcaatgcccaattccgcaagattattgagtgtatataaagggttagcgcacatatcgaaggcgcgatgaaaagtcactgccagcggaccggcagcagccattattttttccattcgtggcatatcgacattcccgtcaacatcgagaacgcccgtcaccagtccaggaaaacctaattcgcggaccgtgcgcacatcctcaagaatggcggcaaactcaccgtcgctgtagcaaaaatcaccaccgcgtgggcgaattatcggatgcacagggatcgtcacccgctggcgcacggatttcagtacacccaagctcggcgttaagcccccctcttttggggctgcgcataattcaactctgtctgcgccgttttgctgcgccgttagtgcacattccatgctgtaacagcaaatttccagtaatgccatttttactccttaattacgcgctctgctcgctggcaacgatctcttcaatggaccacggatgaaacttaatagttgttttgccatcggtgaccgccagcgtcggattcggtaatcgctcatgctcaccttttgggctactggttttcacactgatccccggtaggctgagtccttcatcagaaagcaatgccagcgcacgggcattcagcgtttctggatcacccggcagaacgatttcaatatgttcccaaccttcgtgtgggtaacgtttttccccgggccacggtagctccacaatagaaaactgccagtgcgcaacctgtaccggttcatgcaatttaaacagacaaatcggtctgccattgatcatattttcactcaaaagctcgccacactgttcaaacccgcgacgccagcgttcagcagtggcgttttgatggcaacgcaaagaaatgtgatcggcagtcagcggagtgatattcaaccccagacggcgggaaagttcatctaatgcgtggataaatcgcggtaaatcgcttgcaatatcctgcagctcgtcgatagattgccagttcgccataatcactcttcgtctttcagtaaaagcgttaatttaccctgttgccctgtgccaaccaaccgctgatttcacgccgcttctgatgcaatagtgaaaacggcaatacgccacgcgcacgttgctgacgaaaacagccatttgcagtatactcccgccctaatttctttaactggtgcgggcaatttttgctcgcttcatcaatgtaaggtattccggtgaatattcaggctcttctcagtgaaaaagtccgtcaggccatgattgcggcaggcgcgcctgcggattgcgaaccgcaggttcgtcagagtgcaaaagttcagttcggcgactatcaggctaacggcatgatggcagttgctaaaaaactgggtatggcaccgcgacaattagcagagcaggtgctgactcatctggatcttaacggtatcgccagcaaagttgagatcgccggtccaggctttatcaacattttccttgatccggcattcctggctgaacatgttcagcaggcgctggcgtccgatcgtctcggtgttgctacgccagaaaaacagaccattgtggttgactactctgcgccaaacgtggcgaaagagatgcatgtcggtcacctgcgctctaccattattggtgacgcagcagtgcgtactctggagttcctcggtcacaaagtgattcgcgcaaaccacgtcggcgactggggcactcagttcggtatgctgattgcatggctggaaaagcagcagcaggaaaacgccggtgaaatggagctggctgaccttgaaggtttctaccgcgatgcgaaaaagcattacgatgaagatgaagagttcgccgagcgcgcacgtaactacgtggtaaaactgcaaagcggtgacgaatatttccgcgagatgtggcgcaaactggtcgacatcaccatgacgcagaaccagatcacctacgatcgtctcaacgtgacgctgacccgtgatgacgtgatgggcgaaagcctctacaacccgatgctgccaggaattgtggcggatctcaaagccaaaggtctggcagtagaaagcgaaggggcgaccgtcgtattccttgatgagtttaaaaacaaggaaggcgaaccgatgggcgtgatcattcagaagaaagatggcggctatctctacaccaccactgatatcgcctgtgcgaaatatcgttatgaaacactgcatgccgatcgcgtgctgtattacatcgactcccgtcagcatcaacacctgatgcaggcatgggcgatcgtccgtaaagcaggctatgtaccggaatccgtaccgctggaacaccacatgttcggcatgatgctgggtaaagacggcaaaccgttcaaaacccgcgcgggtggtacagtgaaactggccgatctgctggatgaagccctggaacgtgcacgccgtctggtggcagaaaagaacccggatatgccagccgacgagctggaaaaactggctaacgcggttggtattggtgcggtgaaatatgcggatctctccaaaaaccgcaccacggactacatcttcgactgggacaacatgctggcgtttgagggtaataccgcgccatacatgcagtatgcatacacgcgtgtattgtccgtgttccgtaaagcagaaattgacgaagagcaactggctgcagctccggttatcatccgtgaagatcgtgaagcgcaactggcagctcgcctgctgcagtttgaagaaaccctcaccgtggttgcccgtgaaggcacgccgcatgtaatgtgtgcttacctgtacgatctggccggtctgttctctggcttctacgagcactgcccgatcctcagcgcagaaaacgaagaagtgcgtaacagccgtctaaaactggcacaactgacggcgaagacgctgaagctgggtctggatacgctgggtattgagactgtagagcgtatgtaatcgatttttcgtgagagtgaagcctgatcagggttagccgatcaggcttttttattgccatctaaatgtattctgaaaatggacatgccattgttttctcactgttggataagaggccagaagcgtaatatccggccccagggaaacgataacggttgaatttaaggaataccgcagtgtttaaatttcttgtattaacattaggcattatctcttgccaggcttacgcagaagatacggttatagtaaacgaccatgacattagtgccatcaaagattgttggcaaaaaaatagtgatgatgatactgacgttaacgtgatcaaaagttgcctgcgacaagaatacaatctcgtcgatgcgcaattaaataaagcctatggtgaagcttatcgttatatagaacaagtgccacgcacaggtgtaaaaaaacctgataccgaacaacttaacttgcttaaaaaaagtcagcgagcctggctggattttagggacaaagaatgtgaattaatccttagtaatgaggacgttcaggatttaagtgacccttattctgaaagtgaatggctcagttgtatgatcatacagaccaatacgcgaactcgccagttgcagctataccgtaactctgaagatttttatccaagccctttgacaagaggataattcacatctttttggcatgttttgttgcaagctattcctgataaataattgcaacaagacatcgagcctttttcactgagttattaaacatactcgcgagcgcgtcgctacgctagcaagcaaaaatgaaacaggaataatcgaaatgggatgttgcgcacagtcaaaataactcaccgtaaataatcatctgctataaataatcactttcatgcaataccagataagctatttttaaacagacacttaccgcacaacaaactaattaaatacaaagaaaggcaacaatcaacttaatgttaatgaaatgttttacatatattaaccacttgtttaatgcggagaatcagtacactattttcttataattacatttgaaattatatgatcaccgggagtgattgattaattatctttactaataatcagactaatatttacctgtttgaccgagttgggattgcgtcgtttctccattaggagtaaagctttaatgtcacctgaagttcacagaataaggaacaggttatgagctatagcaatattcttgtcgctgttgcggttacaccggaaagtcagcaactgctggcaaaagcggtatctatcgccaggccagtaaagggacacatcagtttaattactctcgcttccgacccggaaatgtacaatcaattagctgcgccgatgcttgaagatttacgcagcgtgatgcatgaagaaacgcaaagctttcttgataagttaattcaggatgcggggtatcccgttgacaagacgtttattgcctacggtgagttaagcgaacatattctggaagtatgtcacaagcatcatttcgatttggtgatttgcggtaatcacaatcacagtttctttagccgagcatcctgcagcgcgaaaagagttattgccagtagtgaggtcgatgtgctgttagttccacttacgggagattaaccgctcttacgcaagctttggaaaggtagcaactttatcgcgctgctggctttccgcgcttcgcggaactatctgctttaggtcgctaatgaagcactcctgccagtggttaatatcgtttttcacgataacgtccagcatttctgcatgacgggaaatacgttccgccaggctcatagtcaatgcacgatccagcgcagctgcaacttcgtcacgatcgtaggggttaacaattaacgcgctcgttaactcgtttgccgctcccgcaaattggctaagaacaagaacgcccggattggctgggtcctgagcagcaacatactcttttgctaccaggttcatcccgtcacgcagtggcgtcactaagcccacgtcagagtagcggaatattttcatcagtaatttacggtcaaaatgctgattcaaataataaagcggcgtccagcctaattgcccgtatttaccattaattcgtccagcttcattttcgagctgatgacgaatatcctgataggcttgcacatcaccacggctcgttggtgcaatctgggtataacgaattttaccatgatgctgcggatatttttccagcaacgcttcataggcgagaaaacgctctggcaaacctttggaataatccagccgttcgacagaaaagatattttgtacgtttttcagttccgctttaagttgcgccagttttggcggcagtggcccggcagcctgtttggctatttctttcggttcaatgccgatcgggtagacttctgttcgaaatgctttgccccaggctgtatggctttttgcgctacgtgtcgtgacgcgggtcaggttagaaagacaatccaggaacgccagacgatcgttttctgtctggaaacccagcaaatcataatcacaaagctgttcaagcaaggtgtcatatgtcggcagcgcgttgaagatttccggtgtcgggaaaggaatatgcagaaagaaaccaatgcgattattcactccccgtttgcgtaattcatgcgcaaatggcaacaggtgataatcgtggatccagataatgtcatcgtcttgcaacagcggcagtaatttatctgccagcaacgcatttacgcgtagatagccgtcccaggcaggacgctgaaattgcaccagatcgagccgataatgaaaagcgggccagagaacggcattggagaattggttgtagtattcgtcaaggtcctgttcgctgaggttaaaagaggcccacgtaatgttaccttttttcaccttttttagcggctgatcctcattccctgtttcaccactccagccaaaccacagtccgcctgcggctttcagtgcccccagtatgccaacggcaaggccaccggcactggcggcgtgctcgtctggtggtgcaatccggttagatactacgactaaacgactcatagtcatcactcctgttatttttacttagatactacgactaaagctctcatagtcatcactcctgttattttctcttttttgttgtaatgcggtggttatcatttcaagccagctccagacatccggcacacccgccagtcgccaacttgcctgagttgcacctgtgccaatttttacactcattccgcccagtcggttaacgactgcgaagccagattcatcggttaaatcatcgcccagaaatacgggcgttcgcccgataaagggagcttcctgcataaaagctgcaattgcctcacctttactggtacctctcggtttgatctcgacaacacactttccctgctgtaacgccatttgtggccagatctgagtaatacgttgcgctaatgtcattaatgcgtcttcatgctgcggagcctgacgataatgcagcgcaaaagccatccctttcgcctccagctccgcgccgggatactgagcgatgactgtatgcagttgcacgctaatatcacgcgcaatcgcatccggcagatgaacgatatgtgttttaccattgatgtcacggcgctccgccccatgcacgcccgctaacgggaagcgataaggttttgccagtgcgtcaagctccaccatactgcgcccacttatcaatgccaatgcaccatcacttgcggttgccagtagctgtagtccttgcagaatattgtcaggcacgacgacctgatcgggatgcggtttgatttccgccagcgttccatcaagatcaaaaaaccaggcatatttcgcggatagttcaggggtttcggttaacggttctgtcacccggttctcctccttctcttttcttattgtgttgcgcagaacgcgctttacagacatgtaagtatagacagtgtgacgggggtcgccatttgcaacgaagaacagccaaccgttatggcggttggctatggtgggaaaaaacgctaaattgttgcagaaaaaagcatcagacagtgcgtttcgctttttgcttgtaacggtcgaagatcaccgctgccagcaggattaagccgcgaaccacgtactgcgcgaaaggagaaatattaagcaggttcatggcgttttccacggtgcctaaaattaagatacccgccaccacataactgatttttccgatgccacctttcagagaaacgccacctaaaacgcaggcggagataacaatcagctcataaccaatgctcgtcattggctgcccactggtcatacgactagccagaataattccggctatcgcacttaccaggccactgagaacaaagataataattttggtgcgaacaaccggtacacccgccagacgcgcggcctcttcgttcccgccaatcgccagggtgttacgaccaaaggtggttttattcagcagcaaaccaaagataatcagacacgcgacggtgagccagattggcgcaggcagaccgaaccagttggcgtaaccaagggcaaagaagctttcatcttcgataccgaccgctttaccgtcactaatgatgtacgccagacctcgaacaatctgcatcgttgccaatgtcgtgatcagagcatttattttcagtttggcgataacaaagccattgaccaggccacagagaacgcccagcaacaaccccgctgccacgccaatccacaggctttcagtcaggttaataaccaccgccgtggtgacacccgcacaggcaattacggaggcgacagaaaggtcaaagtcaccggaagcgaggcagaacaacatgccacaagccaccatcccgctcatggaaattgccaggcccaaccctttcatattaatgaaggtggcaaaatttgggacaaaaatggcacaggcgataaagagcaccgcaaacaccaccagcatgccgtactgatcccagatacgcccgaagctgaaactgctcttaggtgcgccagacccgcttgtagaaacagaagacatcatactctccttactcaggcaacagcctggctgactttaggcatcgcaaggctcagtgcctgacgctcatctgcctgctcgtgtaacaattcaccggcgatttcaccttcccgcatcaccacaatccggtcggcaacgccgaggacttcaggtaagtcgctggaggcaaacagcaccgccacgccctgcgccgccagcgcataaattacgttatatatttcgtgcttagcgccaacatcaatgccgcgcgtaggttcatccagcaaaatgaccttcatctcttcgcttaaccagcggcccagaatggctttttgctgatttccgccactgagattcatgatcagttgctccgcgcccggcgttttgatgttgaggctacgaatgtggtgatcggcattgttttcttcccaaccgttgttgattacacaaccgccgagcacatgtttacgtctggcactgatgttgatattgtcgcgaacggagtgcacgggaataatgccttccgctttgcgatcttccgggcagagcatcatgcctgcggcaatggcgtggctcggtttacgaatatcgatcggctgttggtcgatataaacctgaccggcggtgatttgcgtcccgccaaacatgcctttcattaattcgctacgccccgcccctaccagaccaaacagcccaacaatttcaccactgcgaaccgccagacttattggcgtacgcacgcctggtgctttcacagcatcaagacgtaggcgctcctcgccataactacgcggttgccagccgtagatatcgccaatgtcgcgcccgaccatcgcctgcaccagcgcgtcgtggtcaacctgctacatatcggtaaaggttttgacataacgtccatctttaaagacagtaatggcatcgctgagggcaaatatttcttccatacggtgagaaacgtataagattacccgcccctcttttcgcagttcacgaataacgcggaaaagattgtcgatttcacgggcagagagggagctggttggctcatcaaaggcgataattttggcgttacgcgccagcgctttggcgatttcaaccatctgccactgaccaatggagagatatttcagcggcgtgtccgggtcaatatccataccaagatgtttaagttgtaaacccgcctcataattcagcaaactgcgattcacaatgccgcctttatgcggcagctggccgagatagatgttttccgcgacggtcatttccggcacgagatgcagttcctggtaaataatcgccacgcccgcgttaagtgctgcggtcgtgtcggaaaaggacatttcctgcccattaatcactacagaacccgtggttggcgcatagttgccgctgaggatttttaagagagtactttttcctgcgccattttcacccatcaacgcatgaacctgaccggcatagcagtcaaaactaatatccgtcagcgccttaacgccgggaaacgttttaccgatgccgcgaaaactgagatacggggtagactgttgcataacgtctccgtgaatcactggtcgttcacaccccctctgcatcatgcagaggggaatttttccggcaaattacttaccgcctaaaccttttttctccagttcttctttaaagttgtcacgcgtgatcagtaccacgtcggtaacttcggtaaattttggcggttcaacgtcttttgctacccagttgtaaagcatttcgctggatttatagccatgtacgtccgggcttggcagcagggaaccgtagaagccggttgcctgtgctttagacagttcgctcaccgcatccacaccgttaatgccaatgccgatgatatcggccgctttaaagccctgaccttccgtcgcgcgtacgccgcccagcacggtgctgtcgttcataccgacgatcagccaatgtttaacttccggatgttgaaccagcatactgttggcagcgtcaaatgcccccgggatgtcgttagatttggtaggtacctgataaatttgtttttccgggaatccggccgctttcagcgcatccatagatcccgtagtacggcggcgggcggtatccagttcgttggcggtaatcgccatcaccgcgctttctttgacatcccagccacgtttctgcatctctttatacagttcctggccctgacgttcgccaattttagtcgccgccatcatcaccagcggaacggtatccattggcttacctttggcgttaacaaactggtcatccacggcaatgactttcatatcgtagccacgcgctttcgcgacgatggcagagccgagtttggggtccggagtacaaataacgaaaccttttgcgccactggcagccaggctgtcgatcgcgttcaatgttttttcgccatccggcacggcaatcttaataacctcaaaccctaaatccttcccggctttatcggcaaacttccattcggtctggaaccacggctcttccggttgcttcaccagaaaaccgagcttcaggttctccgccatagcggattgactcataacggctgccagaccaatggctgccagggctttagtaaatttgtgcatggttctctccagctttagtgtcgttttgtgtagggcaaaaacgaatgacattcgttaaattaatcggaaaacaaagcattaccttttaactaaaagataagtgactgtgttgacatagttttagcgagaaattaattctccataggagagcaatatcacatcgcagaattacagtgagaacgtgcataaatttagcgggaaaagacataagggaaagccaatttgtcagacaaattgtcgaatgcacagcagattaatccataagattagcctggaaatccttgttgtctttggtacccatgcgggatgtcttctttttaaccagtcaataggccgcattacctggcgttgagtttttgaaatggtgtaataaccgcaactcaaagatgtggaaaatgcacgtcattcatttcgtcattaattatcactgtgctcattaattaacagaacacgtataatgagagccatctcgcaaaaatgaaaaaacgttttataaaatcatcacttcatcatgaattcaaattcattgattaatatcaacaagatacaaaaagcactatcattaaaattcattgcagttacattgatttcatcaatgaaatgtaaaaatatataaacttgatgatttaagcattttcttatacccgttcagacgttattcttatttcagatcatcgtcagaattgactccacgatcacatttcggaccggcagaaaggaattattctgcaaacagtaattatggtgttttgatttatcttgcacctctccacttctggatataaggatattaggtatggcaaccgctggaatgcttctcaaactcaactctcaaatgaaccgcgagttttacgcatccaatctctaccttcacctgagtaactggtgttctgaacagagtctgaacggcaccgccactttccttcgcgcccaggcacagagtaatgtgacccaaatgatgcgcatgtttaactttatgaagagtgtcggcgctacccccatcgttaaagccattgatgttcccggtgaaaaactgaactctctggaagaactgttccaaaaaacgatggaagaatacgagcaacgttctagtacgttggcacagttagccgatgaagcgaaagaactgaatgatgatagtaccgtcaatttcctgcgcgatctggaaaaagaacagcagcatgatggtctgttgctgcaaaccattcttgatgaagtgcgcagtgcgaaacttgcgggtatgtgccctgtgcagaccgaccaacatgttctgaatgtcgtgagtcaccagctgcattgatcatcatcggcgctaatgcattgcgccgatgaaggttttgagaaaccgctgcctcatctgtttgaagcagcggtttttttaatgggattcaccctgtggggtaaacttgagttcaataagcgcgatggctttttggattgcccgcatggtgaccgggtctgcggcggcgggatggttagtaaagtcgatattcttcagctgactggacattttttcacgaacttcaacgggcgcgattacatcgagaacatccagaatttgtttgataaccaactggcaagcaaccacatcagaaaccaattcctgatcggcattcagcggctgggacatcgtaaactcctgatagcattttgaaagccgttatagtagcgacttcacatcttcagcgatagtcacatccaccgtcatcaggacacaaaaaaacctgccggagcaggttttttgttatcggaacatattgcctggcggtacgtctttgaacgtcttgcaatagttattgaacatacttttcaggattttgcgcagtttcatcgcggcactccgaccatttgttatacaggtgttattgtctttgcgcttataatatgacaaccatcacaaaaatcaatctttatgtgatacaaatcacataaatacccctttaatgttataaaaatgataatcaaaaaacagcccccctatttctgacacctacagatggcaagaaatagcgcctgccaggcgtcttttccggccattgtcgcagcactgtaacgcgtaaaatagtgctttctcttactcttctggctggaccatgagacttctgattctgactcttagtttaataacgctggcggggtgtacggttactcgccaagcccatgtgagcgaagttgacgcggcaacaggtattgtacggttagtttatgaccaggcttttttgcagcatgcccataccgatcgttatgtcagtcgcgggatcgccgatcgcgcatgccagcaggaaggctatacccacgcggtcccctttggtcagccagtaggcaactgtagcctttttgcgggttccttatgtttgaatacggaattcactttgagttatcagtgccatcattccgccttccctgtctttctctaaatattttaatcagcgaggggatcttcgctgattaaagaaatagcggtaatgcgttttattcccattcgtatttttaataattgaagtttatattttaccttttgcaaataataaaataacaaattatagtgacgccacagcaacaaatataacctttgtggagcactatcatgctgaaaccagaaatgattgaaaaacttaatgagcagatgaacctggaactgtactctagtctgctttatcagcaaatgagcgcctggtgcagctatcataccttcgaaggtgctgccgcgttcctgcgccgtcacgcccaggaagagatgacgcatatgcagcgtctgtttgattacctgactgataccggcaatttaccgcgtattaataccgttgaatctccgtttgctgaatattccagtcttgatgaattattccaggaaacctataaacacgaacaattaatcacccagaaaattaacgaactggctcatgctgcaatgaccaatcaggactacccaacatttaatttcctgcaatggtatgtttctgagcagcatgaagaagagaaactgttcaaaagcattattgataaattaagcctggcaggcaaaagcggcgaaggtctgtattttatcgacaaagaactctctaccctcgacacacaaaactaatgctctccggcggcaggtttactgccgccgtttcaaatcagtgacggcaaatcttactctgatcggtgctaaaaccgtctttgctaggtataaatttgccttttgctgccagaaacgctaccagctctcccgctgtcatcccttctgcgctgcaggtgtgaaaacgtgcctgttcaccaaaacgcgctttaatcgcagcttccagactggcatgcgtatattgctcgccactttcaatcatcatatttaacacttcatgaccgtgaatagagtccatcgtccctcctcaaaaaaagcctagcgtagcgattgccgcttatgaagactttgcgccagcgcaggactgaatgctttttattgtacatttatatttacaccatatgtaacgtcggtttgacgaagcagccgttatgccttaacctgcgccgcagatatcactcataaagatcgtcaggacagaagaaagcgtgaaaaacagaaccctgggaagtgtttttatcgtggcgggaaccacaattggcgcaggcatgctggcaatgccgctggctgcggccggtgttggttttagcgttacgttaatcttgttgattgggctttgggcgttgatgtgctacacggcgctattactgctggaggtgtaccagcatgttccggcagataccggtctgggcacgctggcaaaacgctatctgggacgctacggtcaatggctgacgggcttcagtatgatgttcttaatgtatgctctgactgcggcatacatcagcggtgccggtgaattgttggcctccagcatcagcgactggacaggtatttctatgagcgcaaccgctggcgtgctgttgttcacttttgttgccggtggcgtggtttgtgtcggaactagtctggtcgatttatttaaccgttttctgttcagcgccaagattatttttctggtggtaatgctggtactactgctgccgcatattcacaaagtgaatcttttaaccctgccgttgcaacaggggctggctctgtctgcaatcccggtgatttttacgagctttggttttcacggtagcgtgccgagtattgtcagctatatggatggcaacattcgtaagctacgctgggtgtttataatcggtagtgcgatccccctggtggcatatattttctggcaggtggcgacgcttggcagcattgatagtacaacctttatgggattgctggctaatcatgctggattaaacgggctgttacaggcgttacgcgaaatggtggcctctccgcatgttgagctggcagtgcatttatttgctgatttagccctcgccacgagttttctcggcgttgcgttaggcttatttgattatctggctgatttatttcagcgtagtaataccgttggtggacggttgcaaactggtgcaattacgtttctgccgccgttggcgtttgcactgttttatccacgaggatttgtgatggcgctgggttacgccggtgtggcgctggcggtactggcattgattatccctagcctgttgacctggcaaagcagaaagcacaatcctcaggcgggttaccgggtcaaaggtggtcgtccggcgctggtggtggtgtttctctgtggtattgctgtgattggcgtgcaatttttgattgcggcagggttgttaccagaagtggggtgatcagatagcctcaaattccttattgggtgccagaattaacgctgacacccaatttggcctcttaatgcaggcagcactgcttaaatttcttaccactaccgcacgggcaaggatcgttacgccccggtttctcttctgctttgatcggttgctgaacagctttttcctgcggatgcgccatccagtacgcatgtagatcaagcgccgccagtcgaatggcatctacgctctcttcaaacgcttctgggctcatcttttctacccgctcgaagttttcctcagtaccgtgcagcgcaatcgcctccagcgctggttttaagctatcgggcaacgtactccagtcagaaagtgccacgccccgcatatagccaaagcaccactcctcaacaatcgtcagctcgctgccatcaacttctcgcaagccgaataacggctcaaactgctccgggaattcgttcagacgctctgcggtatcggccatatgttgaaaagccagattcataaagcgcgtcatctctttctcactcgcccagcgcggcacatagtcagccccaccccacacggcaaccagccactgttccggttcaatctcttgcggagaactcaacaccgccgtcaataaaccgtccagctccgccacatcaaggatggcgtggtcagtgttgtatttggtcagaatatcgtccagccattccaactcactttcgtttaacggtcccgttttcatacgcttttccttgtggatctcaactcgccagcacctatcttacatgccggtccgtatcagagatactttttgagtggctttgctggtgattaaaaattaaggagggtgtaacgacaagttgcaggcacaaaaaaaccacccgaaggtggtttcacgacactgcttattgctttgattttattcttatctttcccatggtacccggagcgggacttgaacccgcacagcgcgaacgccgagggattttaaatcccttgtgtctaccgattccaccatccgggctcgggaagaaagtggaggcgcgttccggagtcgaaccggactagacggatttgcaatccgctacataaccgctttgttaacgcgccaaattcttcaggcctttcagccagacatccgcttgacgccgatgtcttttaaactggagcgggaaacgagactcgaactcgcgaccccgaccttggcaaggtcgtgctctaccaactgagctattcccgcattcatcaagcaatcagttaatcacttgattttattatcgtctggcaatcagtgccgccgttcgatgcgttgcattctacttacctggcgcgatgagtcaacgatatttttcaccacttttgatcgtttgctgaaaattacgccgaaacgatcactgatcaagcaaatctgcacgcgcagcgctcaaatattgcaacatactccacagagtcagtaccgcagccacaaagaaaagtgcaataccggcgtactcaacccaaatgttcggacgccacagcagccatgccaacgccaccatctgggcagtggttttcactttcccaatccaggagacggccacgctactgcgtttacccaactccgccatccattcgcgtagcgcagaaataataatttcacgggcgatcatcgttgccgccggtaatgtcacccaccagctgtgataatgctcggttaccagcaccatggcgatagccacgagaactttatctgccacagggtcaaggaaagcaccaaaccgggtactctggttccagcggcgtgccagaaaaccatcgaaccagtcagtcaccgccgcgacgcagaaaatgagcgcggcggcaaacgggctccaggtgacaggcagataaaagaccaatacaaagaatgggataaggatgacacggaacagtgtaagcaacgtagggatattaaattgcataatgacgggtaactatctgttgtcagtaagattacccctatgttgctacagagacatcaatgtttcaagctccagaagatcttttctgccagaccttggctaatacccggcacttttgcaatttcctcgacgctggcgttacgtaaaccttgcaaaccgcccatatatttcaacaacatttgccgacgttttggcccgacgccttcaatggtttccagggaactggtatttttgaccttcgcccgttttttacggtgcccgccaatcgcgtgatcatgactttcatcgcgaatatgctggataacatgcagcgcgggactatctggcggcaaactaaatccctcaccttccggctcaaagaacagcgtttccagtccagccttacgatctgctcctttggcaacgccaagtagcagcggatgatttttatcccaactgacatccagttcggcgaagacatttttcgcctgcgcaagctggcctttgccgccgtcgataaggatcacatccgggatcttactgtcgtcaatggctttaccataacgccgacgcagcacctgattcatcgccgcataatcatcgcccggcgtgatgcctgtaatgttatagcgccgatactccgcacgcagcgggccgttagcatcaaacaccacacaggaagcgacggtttgttcgcccatggtatggctgatgtcaaagcactccatccgcttcacttccggcaatttcaacacgctggcaagcgcggtcagtcgctggtgaacggtagattgctggctaagtttgctggttaaggccgtcgccgcattggtgcgcgcgagtttcagataacgcgccctatcgccgcgaggtttggtttgaacattaatcttgcgtcccgccagttcactaagggaatcggcgagcagcgttttatcgctaagattaaaatcgagcaggatctcacccggtaaggtgcgcatctggctgccttgtaaatagaactggcctacgaaggtttctaccacctcgctcagttccgtaccgccaggcactttcgggaaatagctgcggctgccgagcactttgccctgacgaatgaacaatacgtggacacaagccatgcccgcatcgaacgccacaccaataacgtcgaggtcgtcgccggtattggaaacgaattgtttttcggtgacgcgtcgcaccgcctgaatttggtcgcgaatacgtgcagcttcttcaaactccagattctggctggcagtttccatacgactaatgagttgcgtaagcacctgatcatctttgccagacaaaaacaggcgcacatactcgacctgctgagcgtattcttcttcactcaccagtccttcaacgcacggtcccagacagcgccctatctggtattgcagacacggacggctgcgattgcgataaacactattttcgcactggcgaatggggaaaatcttttgcagtagcgccagtgtttcacgtacggcatagccattcgggaacgggccgaaatattcacctttggcatgcttcgcaccacgatgcatcgccagacgcgggtgggtatcaccactcaggaagataaaaggataacttttatcatcgcgtagcaaaacgttgtaacgcggctgatagagtttgatgtagttgtgttccagcaacagcgcttcggtttctgtgtgagtaaccgttacatcaatttgctggatctgggcgaccagcgcttcggttttgcggctagcgaggttgctacggaaatagctggaaagccgttttttcaggtctttcgctttgccgacatagataaccgtaccaccagcatcgtacatgcgataaacgcctggctggctggttacggtttttaaaaacgcttttgcgtcaaactgatcactcactgactacttaatgtctccgcattacacagaccatggcgaattgccaggtgagtcagctcaacatcgccatgaatgtttagtttactgaacatacgatagcggtagctgttcaccgttttcggactgagattgagctgttcactgatctcattgaccttctggcccttggtgatcatcagcataatctgcaattcacgttcagacaaactggcaaatgggctttctgttttttctggttcgatctggcttaacgccatttgttgagcgatgtcagaagcaatgtaacgctgcccactatagacagaacgaatcgcactcacgacttcctgcggagccgcgcctttgctgaggtagcccgcagcaccggcctgcatgactttcgctggtaaagggttttctgtatggacggtaagcatgatgattttgacatcagctgtggaacgcgcgattttacgcgtcgcctcaagaccgccaatgcccggcatactcatgtccattagcaccacgtcaacggcatttgtccggcaccacttaacggcgtcttcaccgcagcttgcctcaccgacgacttttataccctttatatcttccagaatgcgtcgtatccctgcgcgcaccagttcgtggtcatcaacaagtagaacgttgatcaaaggaatatctccagaaatagggataacgctactgatagttagtcattcgtatattagcggtttttattgcaactttgaaacgttaaaaatggtgggtattcgatttttctctcgtttttgtcaattcgattgtccacagttatggtcacgcccgtcaccaacggcttaccggatcgtttcacagtaagccctacgatgaaatgtgacaaaaattgactttattcagcaaaaatgaaaatcagcccgctgaatatgtaacattaattaacccgaacaatacgggcaaaaaacattcatgataaaaatatttattggtcattatattaacgtattttatagcactgccgatatcacgctcaaaaaacaaccactgctatttttagcaaagcttatggtatactccgccgccttaacatttttcaccgcaaattttcattgcaacatgacgaggaaaataaatgagtacgcctgatttttctactgccgagaataatcaagaactggcaaatgaagtctcctgcctgaaagcgatgctgacgctgatgctgcaggcgatgggacaagctgacgcgggccgcgtgatgttaaagatggaaaaacagcttgcgctgatcgaagacgaaacccaggctgcagtattttccaaaacggttaagcaaattaaacaagcctaccgtcagtaatataaaaccggctgatagcgtgcctttcagccggtttttgcatctggcacgcaggacagaaaagagatcaaattaagccagtagcggccgcgtaacaggcaacctgggtcttatttggtgcattaatttttttctgcatgtttttctggtggaaattgaccgtattctcagagatactcaaaatcatcgctatctctgcacttgttttcccttccgccgtccacctcagaatttctttttcgcgcttgctgaaattcatctctggcgtcatcactatttcatcatttaaacgcatcagagccatcagactttcgcgcaccagtaactgcatttttaattgcagttcatcactaagaatgggtatttcgcgcgcgctgcaacgggaaaaggacaaaaagcccagcgcccggtttggcagcattaaatactgagtgacaccgcggcgtaaaccatgtgcgcgcgcggcttcccataacggctgtgcttcgctgaataagtcatcattccacattaaatggccctgactaaagttttcagggttcagcaccggatcaattgcgagaaagttttttgcctgataataactaacccacgcctcagggtaattggtgtaaaaagccactttaggtcgagtgaatggtaccgggtggcggacacataagctatagtaatcgtactccagctgctgagcctgaagctcaatttcatggtagacctcttctgcggtctccatcctctgaaaacgcaacagcatcgtgcgacgccagctgaaaaaatccttatcctgcatagtaaaccgcaacgcccttgagagtgagtatcatttataatgataattcaaactatcacataaataagatttatatataatttatattattcaggcaatgaattacttttgcaagccatcgcattctcttatgttattaatgagttatgctgatttgttaagcagttttatcaggcttgaaatggcgtccagccccgacaggtgaatcgtcggggctgattttttcttattattgcagcagaaacttctcgaggaactggcgggtgcgaggctgctcggttccgtaacgtttatcatgttatcctaaggattatccgaaaaataatacctacgaacatcttccaggatactcctgcagcgaaatatttgttttaagctcactcacatatcgcaacatttactttactttaagacaattccaggcaaattatacaacactttacgggatagtaagtccgcctgaaaaatcgcgagagtggcgcattaggtgacccatgttgttccgtttagtcatgatgaaatattcaggtaaggggaattatcgttacgcattgagtgagggtatgccatgagtacgattattatggatttatgtagttacacccgactaggtttaaccgggtatctgttgagtagaggggttaaaaaaagagaaatcaacgacattgaaaccgttgatgaccttgccatagcttgtgatagtcagcgccctagtgtggtgtttattaatgaggactgtttcatccacgatgcttctaacagtcagcgtatcaagctcatcattaatcaacatcccaatacgttatttatcgtttttatggcaattgccaatgttcattttgatgaatatctattggtcagaaaaaatttattgatcagttctaaaagcattaaaccggaatctctcgacgatatccttggcgatattctgaaaaaagagacaacgataaccagctttttaaatatgccgacgttaagtttgagccgaaccgaaagcagtatgttgcgaatgtggatggcaggtcagggaaccattcaaatctctgaccaaatgaatatcaaagccaagaccgttagtagccataaaggtaatattaaacgtaagatcaaaacgcataataaacaggttatctaccatgtcgtccgactgacggataatgtgactaatggtatttttgtcaacatgcgctaacacattctgactggtggtttcccaccagtcaggctgaataagattactctgctttctccacaaagataccgtcctgatgccctgcttcattaaagaaccagatgccgagcgggtagtcttccaggctaaccaggtacattgtgccttcactaaactcctcaactgccagtaccacgccaggacgacgcggaccgccatccgttttgactgttacccgatcattcaccttcatcgttttcctcctgtggctttgtgccagtgtagaacaatttcgtttttctggcagcgccaggcgcgcgcgagtgctgattttctcgacggtctatacttaagagatgccaggcggacttaacgactggcggcaacaacagagtaacggttgcgaggaaagatgatgaaaaccgcaaaagagtacagcgataccgcaaaacgtgaggtcagcgtcgatgtcgatgccctgctggcggcgatcaatgaaattagcgaaagcgaagttcatcgcagccagaacgattctgaacacgttagcgtcgatggacgtgaatatcatacatggcgtgaattggcggatgccttcgaactggatattcatgacttcagcgtctctgaagtgaatcgttgaatgcacaataaaaaaatcccgaccctgagggggtcgggatgaaacttgcttaagcaagaagcacttaaaaaattcgttacaccaggaaatctgatgtgttcatcaccttatccgcaatttttttcgctgacaagaaaatattcgccatatgaatgattaacgctacttatgaatagaaatgtgacgcacgtcaccccttggtggctctggcgtcagcgggatcgctcccgaaaaaatcatctttgataatttgtgcggttttgagaatcatcctggtaagaggagtactgcgcgactatgtttagtattcaacaaccactactggtttttagcgatcttgatggcaccctgctggacagtcatagttatgactggcaaccggcagccccctggctcacccgtttacgcgaagcaaatgttcccgtcattctctgtagcagtaaaacaagtgcggaaatgctgtacttgcaaaaaacgttggggctacaaggtttaccgctgattgccgaaaatggcgcagtgatccagcttgctgagcaatggcaggagatagacggttttccacgcatcatcagtggtattagccatggcgaaatcagcctggttttaaatacgctacgcgagaaagaacattttaaattcacgacttttgatgatgtcgacgatgcaaccatcgccgaatggacgggattaagccgtagccaggcggcgctgacgcagcttcatgaggcgagcgtaacgctaatctggcgcgacagtgacgagcgtatggcacaatttaccgctcgtctgaacgaactgggcttacagtttatgcagggtgcgcgcttctggcacgtactggatgcttctgccggaaaagatcaggctgccaactggattatcgcgacctatcaacaattgagtggcaaacgcccaaccacacttggcctgggcgatgggccaaacgatgcgcccttactggaggtaatggattacgcggtgattgtgaaagggctaaatcgtgaaggggtgcatctgcatgatgaggatccggcccgcgtctggcgaacgcagcgtgaaggaccggaaggatggcgtgaagggctggaccattttttctccgcccgttaagcgttatcgctcgcgaatacccgattacgcccagcctgtttagcgagataaagccgacggtcggccagactctggagttgttcaaaatcataatcaccggtttcctcgctgctgcttacccccaggctggcactgatgcgtatcgtcgtactcttggcgatcaacatctctttttcatttaatttcagtcgaatacgttctgcgacctccgcagcctccgtcagactcgcgcctggcagaatcacacaaaactcctcaccaccgacccgcccggcaacgtcctgcgcacgcaaggaactgctaattaatccggcagcatgagaaagaacacggtcgcccgcctgatgaccaaagcggtcattaatcgctttaaaatggtcaagatcgacctgaatgacagaaaaaggatgttggtgcgtctgacacaatttagcgagcggacgggctttttcgaacagtgcgccacggttatataaacgcgttaaggtgtcgtgccacgcctgccactgcaagctgctttgcagaacatacatgttgctaaccatccggcgaatcacataccaggagatgagtaacatggtggtaaagagcgcccacagcagggttaatgcaatgctgatactgccgaaatcgccgcgcacgccttcgcttaacgtatggacacgcaccagcacaccgtcgaaatggtccagacgttcccagctaacatagcgactgtccatacgaatgccgccccgcgtgtcatgttccattgcctgcgccagcaaggccagttcacgaggatcaaaaatattccctgttggatggtcaggattggaagaggtcaaaaatctcagcttactgtcatagagctgatactcaccatcgaggtttttatcgatggcgtttcttaaaaattgctgcatagtacgcacgggaatactcatccccagcacgccataccagtagttattactgtctaccggaacactgacggtaacctgcggttcagtattgctggcgtgttccggttggctagtgaaccagcgtaccgcgcggtgacgattttctcgttgactatggccaataaaccagggttgggtgacatagccgtaataacgcgttggaacattgcgcgtaaacaaggtcggctgcgtgctaacgtaaaatccggcacggctgacatacatcgcctgttcaaccatgctgctggagttgtgcgctagtcgcagcaagtaaccaacttccagtgcagcggtaatttcattgtcgaggctttcattttcgcgagacaggagattcccctcgctgactaatgcatcgctcacaccattaactggcagagtgcgtcgtcggttgagttcgattttccaggcgtgctcgtcgcgatgctgttcgaactcggttacagcatcacgcagagaggtgaaatccagtggcgctacgagagcttcgcgcatgccattacgtaaaaagatcagtttgtcgacgttatactgcaaatgcttatcgagcgcgttggcaacgttttccagatgattacgctggctggagatataggcatcttccagcaccaccacttcacgccaggtgagcaaggtggaaaaaagcaataccacgataaagcagagattaacgacatgaccaggccccaggcggcgtgcgagttttttcaaccagctctggttttccatttttgtctcgtgctgcaccctgacgactcccaacctgcttttttatgattctggcataacctggcgatagcgtaccgcaaaacagcgataattttataatggtggcatgataagacgcgactatcattcattgcaggcattagcacaccaggccggatgtgatccggcctgatgttaatgataccctttcacacttcttccgcagaacgactcccctcccccggaacaagctcggtttcatgaaaagcttcccgcttgaccccgtaaccgtcataccaacgacactcaaccataccgctggagtatccagtgacaatcatccgcgggccgccctctttaaccgtaacttcctcactaaccataaagctcatactcgcctccttttttcgagtgaaacttgttcaccttagttgaagatggcgaattttgcataatagccagtgcgagtattaatgtgcctgaccgcgcattttctctacggctttcactcccagcaccacgatgccgccgatgataaatccaagaatcagatttaaaacagtcggtaatatcatcgccactactgcactttgctgcccggcgaaatgttcaatggcgtgatgcagcggcgcaattccatgtaccacaatcccaccgccgacgaggaacatcgccagcgtgccgacaatgcttaacgctttcatcagccagggcgcgataatcaataaccctttacctaatgcctgcatcagcgcgctggatttttccgccagccaataccccaggtcatcaatcttaacgataacccctaccagaccgtagacgcccacggtcactaccagcgcgatgccactaagcaccagcacctgattaagcaacggcgcttcggccacaatccccagcgtgatggcgacgatttccgcagacaatataaaatcggtacgaatcgccccttttattttgtccttttcaaacttcagcggatcctgcgccgccagcttctccagacgctgctggctctgcgccggatcttctttatgtttacgcgcctccagcatatgcagcactttctctactccttcaaagcagagaaacgcgccaccaatcatcaacagaggcgtaatcgcccacgggataaacgcactgatgatcagcgccagcggcaccagaatcactttattaatcaggcttcctttcgccacgccccagaccacgggaagttcccggttggcccgcacgccactaacttgttgcgcattgaggcttaagtcatcccctaatacaccggcggttttcttcgccgccagtttgcccatcacggagatatcgtccagtagtgtggcgatatcatcgagcaacgtcagtaaactactcccggccaaaagcattccctctcatttttattgttgaagggtgtaagtatgaagcaaaaacggcagctctgatacttgcttcacaggtcaacatttttttaacaatcaagtgcaattatatctctcgccagcagaatgattttcacgtttactatgaaccacctttttatttccaccgtgagggattatgcgtttccgccagttgttaccgctttttggcgcgctgtttgcgttgtatatcatttggggcagtacctattttgtcattcggattggcgtggaaagctggcctccgttaatgatggcgggcgttcgattcctggcagccggtattttattgctggcatttttgctactgcgcggacacaaactccccccgctacgtccgctgctcaatgccgcgctgattggcctgttattgctggctgtcggtaatggcatggtgacggttgccgaacatcaaaatgttccttccggcatcgccgccgtagtggttgcaaccgtgcccctctttaccctgtgcttcagccgcctgtttggcattaaaacgcgcaaactggaatgggtgggtattgccattgggcttgccggaatcatcatgctcaatagcggtggaaatttaagcggcaatccgtggggcgcgattctgattttaatcggcagcattagctgggcgtttggcagtgtttatggcagccgcattaccttacctgtagggatgatggcgggtgcgattgagatgctggcggcaggcgtggtgttaatgatcgcgagcatgattgcgggtgaaaaactgacggcgctcccttcccttagtggcttccttgcggtcggctatctggcgctgtttggtagcattatcgccatcaacgcttatatgtatttaatccgtaatgtcagtccggctctcgccaccagctacgcttacgttaacccggtggtcgcggtcttgctgggtacgggactgggtggagaaacactgagcaagattgaatggctggcgctcggcgtaattgtcttcgcggtggtactggtcacgttgggaaaatatctcttcccggcaaaacccgtagttgcgccagttattcaggacgcaagtagcgagtaatcaagcgagtaaatgaatcccctgcgtgtcgatctgcgcgctggcaccttcgccgcagatccactcttccagacgctcggtaagcgcttcatccgtcagcttctcgcgcccacgtaacgcgcactcccagacaatcaatacgcgccagccgagttcctgcaagcgactgatatcgcggcgatcgcgctcaacatttttacctatcttctccagccagaactcggttcgagtcgcaggcactttaaacagatagcagtgatgatgatgccagaagcagccatgggtaaatatcacgcagcgatattcatcaacgacaaaatccggacgtccgggcagactggcgtcctgaacgcgaaatgccaggccctgcccggttaacagactggcgaggcgcttctctatcgccgtatcacgcgtggcaatcgcgcgcatatttttgctgcgagtggccttatcgtgaacgtcggccatgttgtgcctcttgctgacgcttagttatcgactacgtcggccatgttgtgcctcttgctgacgcaacgccaccgcctgtttgatttttggctcaagcagttttgccaccgcggcaaagaccggcacgaccacgctgttaccgaactggcgataggcctgagtgtcgctaaccggaatacggaatttcgcttctcccggcgcttcaaaacccattaagcgcgcgcattcccgaggcgttaaccgacgtggacgatgttgctgattcagcggatcgtcaaagtctttctcacccgtggccatatcccagccgcgatcgattaaaatttccgcgccatctttgtaataacgcgcagacagcgtacgcgtgacgctttgcggattgttcggataaaccattccataaccgaagccgttaccgcgcgcctgatgttttttcgcatatcgatagaggtacttccacagcaccggcgtcaggatatatttcgcctcgaccatcgggtccaacagctgcgccagcgtcactcgctgcgcagggaaacattcgctgatatcacgcagggtaaaatcggctttcagattcagatcgcgacgaaaacccaccagcacgatgcgttcacggtgctgcggcagaaaatgtttgccgtcgatgattttcggatcgtctggcccattatcttctgcatcagccacgtcatagcccagttcgtccagcgtctgcatgatgatgcggaacgttttaccctggtcgtgacttttcaggtttttgacgttttcgagcacaaacatcgccggacgacgcgcgtcgataatgcgtaccacatcaaaaaacagcgtgccctgggtatcgcaggcaaaaccgtgcgcccgcccgaggctgttctttttgcttacgccagccaggctaaatggctgacaagggaaaccggccagtaaaacatcgtgttcaggaatgtgttgacgaatatgttccgccgccgcctcatcactcacgccttctttatggctgagggtgatgtcgcggatatcttcattaaaatgatgcgtcgccggatcgcaataatggttggctttataagtgcgtaccgcatgtttgttccattcgctggtaaacacgcactgtccgccaatgctttcaaaaccgcgacggatgccgccaattccggcgaatagatcgataaagcgaaacgcataatgcggatgatgtgccggtggtttgggtaataacgtttgcagatgggcgaactctttctcacttaaacggtgccatgcgctgtcattcgccagcgcacgttttaaaattgccgcgctccagtgattctcacctacaccattaagctgcgccaccaacgttttaacatcataaatttgcagcagtttctccagcattgcctgtgcggcattcccggtgctgtaactatcggttacacttatattttcctgcatagatttcaccggccatctgagatggccgacaggttaacataattacagccatttagggccacgcgctcagccagcggaactaaacgcatctatcaccttgtgatcgacaccttcattctcccccgccagttcggcactgagcttcgccataaactcgactaaaaaatgcgcgttgtgctgcgccagctgcttgcctcttgcggtttgcatggtttgcggtagcttcagcaacttagtctggaaatgatccagcgcgtagcgtttatcatcaagcgggcgatgctgtgcgaacggatcttcaccatcaaacagcgccacgcccaatgccccactaacggcaaacacgcgcgccaggccaatcgcccccagggcttccagccgatccgcatcctggacaattttagcttccgttgttaagggggcgatttgcgcgctgaaactgtgagcggcaatggcatgacaaacggcctcgattttctccgccggaaattgctcgaactcttcacggagcaggcgacgcgtctcttctgccgccaggatactagaacgctgcctttgcggatgatttttcgccaggctcacaatatcgtgaaaataacaggcggttaaaatcaccagcatatcgacatcgtcatctgccgccagcttctgtgccgtagcccagacgcggcgaaaatgacacacgtcatgggccgcgtcctggtgctgatgatggtttttcaaccagttttcgaactgtgcctgccagtgttgtaagtccatacgcgctccgttgccaaagagtcgccaccttagcagtttttattcatagcgtctgctacgtgcgggacgaggtcgggtgtaccaggcaatgctgcctaacaatgccccgaccagagccataaataaaaatccgaccagtgcccctaaccactttcccgcggtagagcctaaatcgctttcaaatccgctcacgggggcatcgggaatccggctcatcacccagatgtaacgcgccattgcccagacgaaatagccacaccatgtatagaaagcccacaaagccagtttgccgccagggctgcgagagagtctctcttccatctttgtgctaccgtattccattttgagataacccggaaaattcagacttagtactattatgtgataaaagtcacatttttccacattggatgagccagtcaagactcaatcattttttgaacaaatagataaattttgcgcaacggcagtgaatacaggaaaaatcgttttgagcgattttatttatctttgatatcggctttattaattcatttaatcaatatattagcactgattacaattatacctttttattattctgtgtcatgatgcttccgttattagccttttatcgtcttgtttatattttttgggccggcatgatgccggctttttttatgccttcattaatgtgcgcctgatcacaccagccgtttggcgcaacaatcattgataccccctatgtttccgctcaactcataacatattgatatacatttataattttcatgaatatttatatttagaattcataattatgaattatattaaatagattagaaacattttgatatcttttaaatacatttgttacatgtaatccttaaaataaaatgaacttcatagaatagtatccaaatgtgctttttttggataacggcacttattgatatattcatgaagattataatcacaagggaatacataatgaaaagaaaagttctggcaatgctggtcccggcgttattagttgctggcgcagcaaatgcggctgaagtctataataaagatggtaataaactggatttgtacggaaaagtagtgggtctgcactacttctctgatgattctggcagcgatggcgacatgtcatatgcccgtatcggtttcaaaggtgaaactcagatcgctgatcaattcactggttatggtcagtgggaatttaacattggcgcaaacggtcctgaaagcgacaagggtaataccgcaacgcgtctggcatttgcaggtttaggctttggtcagaatggtactttcgactatggtcgtaactacggtgtcgtatatgacgtagaagcatggaccgatatgctgccagaatttggtggcgatacctatgctggcgctgacaacttcatgaacggtcgtgctaatggtgttgcaacctaccgtaacaatggcttctttggttaggtcgatggcttgaactttgctttgcaatatcagggtaataatgaaagtggtggaccattcgggcaggaaggttccggtagtggtgatggccgtagcctttccaaagaaaatggtgatggtttcggtatgtcaacatcctacgacttcgacttcggtttaagtctgggtgctgcatatcaaactctgatcgttcagatcgtcaggttggagttggtttaaatgatcgtaaccatagcaacagaaatgctggtggtgaaaccgctgaagcatggactgttggtgcaaaatatgatgctaataatgtgtatttagcagctatgtacgctgaaactcgcaatatgaccccatatggtggtggcgagtttgataatggtgaatcaagatcagccatcgctaacaaaacccaaaactttgaagttgttgctcagtatcagttcgactttggcctgcgcccgtccatcgcttacctgcaatctaaaggtaaggatttaggcggttgggctcatgacggcaacggcgacccacgttacaccaataaagatctggttaaatacgttgatattggtgcgacctactacttcaacaaaaacatgtccacctatgttgattacaaaatcaacctgctggacaacgacgatgacttctacgaagcaaacggcatcgctaccgatgatatcgttgctgtgggcttagtctaccagttctaatcagtcaactcgctgcggcgtgttactgtaaaactgaacactagcctgagttcgtccctcatcgaactcaggcttttttattggcatttcatctccatctgcggcacacgcaattgccgaagcatatcgatacagcaccttaccctgcccctcctggcacaataacatcaaccagctactcttcaagctaacacccaaatgcatttctttatgaattaatccgtaacaaacacgcttcccatatagaaatatttgcaaaaatagtgcatgaaataagctttttctctaccaatccgggatataaatattcatcagcaccacaatattccacagcactaaatctctccccgccaccccgtacctctgataatggtctaaaatcattgaagccacttgcgacgacgttgctcaataaggaaaatttggcgtgaataatattcaacaccagtgcagcatcatcattacatacttacagccgccgactaccgctttcgatatattgactcaattttccagcctggttaaaaatagcgaccagctcagtcgcaaatatagtgactaccctaactaagcaacaataaggaatacactatgactgttcaaacaagtaaaaatccgcaggtcgatattgctgaagataatgcattcttccctagtgaatatagccttagccaatataccagtcctgtctctgatcttgatggcgtggactatccaaaaccttatcgcggtaaacataaaattctggtgatcgccgcggacgaacgttatttgccgaccgataacggaaaactgttcagcaccggtaaccatccgattgaaacgttgctgccgttgtatcatctccatgctgcaggtttcgaattcgaagtggcgaccatttccggtctgatgaccaagtttgaatactgggctatgccgcacaaagatgaaaaagtaatgccattctttgagcagcataaaagcttgttccgcaatccgaagaaactcgcggatgttgttgccagcctcaacgctgatagcgaatatgcagcaatctttgttcctggtggtcatggcgcacttattggtttacctgaaagccaggacgtggctgccgctttacagtgggcaatcaaaaatgaccgttttgttatctccctttgccacggcccggcggcttttctggcgcttcgccacggcgataacccactgaatggttattccatttgcgcattcccagacgccgcagacaaacaaacgccagagattggctatatgccgggtcatctcacctggtacttcggcgaagaactgaagaaaatgggcatgaatatcattaatgacgacatcaccgggcgagtacataaggaccgtaaacttctcaccggcgacagtccttttgcagcgaatgcgttgggtaaactggcggcgcaggaaatgctggcagcttacgcgggttaatccctgttacgtttgaatgtaagcgcataatcaatcgcggccgcgttagtactcacgacgtggctgcgttttttcacggttaatttatggcgtactgaagccctatgttaatttctttgcggtaacgtaatccggaacacattatgcttattgagatagtgatacgtagcacttcccccatgcaattcggcaatcgctttgactaaagaaaggcctagtccctgacctacggaatgacggctattatctccccgccaaaatctacggaagagtttttcaggctcattaattttcgttccagggctggcgatatcaatattaagatagctgttggtatcaagaaaactggttatatgaatacggcttttttctgggctatatctaatggcattaacaataagattgcttaacattcgttgtagtaaaattttatccgcaaagatttgctgattgcactcgaccttaaagcaaatctctttctcgtcactaaggtattcaagatagtccaacaaattttcgacttccttattgagagaaaggctgtccagtttcaccaaaacattgtttttatctgccctggcaagaaacagtatgttctctgttaaccggctaatattttccagctcttcaatgtttccggcaattgttttttgatattcagcgatacttctggtttgactgagcgtaacctgattctgacccagtaatgcattaattggcgttctaagttcatgagcgagatcgtcagcaaactgacttagacgctcaaaatctttgactaaagcatgatgcattttattcaacgcctgcccaagaggttttagttctctcggtaatgcgctaacctcaacaggctctcggctatcgttataattcagcgcttccgttacaccactcaactttttgatctctcgtaatcccgttctgattaacagcggacttaatacactgcaaagtacaatggcgacaatgcaaattataatgctattaattttatactgttcaagcatgttatgtctggcactagccaatttagccacagtaaccgttaaacttgggctaacttcatcaatattaattcgtaaagcatctatctctgtatcattaataatgcttctgtaaatgccagctgcgctgattgtctcactagcaggtatgttatttaacatgccatcactgacatttgtccggttaacaattttattgatgctatcaccatgaataatcaagatatcctgactaacatccatcatccggttaaagtacacaggtaacgtatctggatttaccccatcaattaacaactgcttgatctgcgctgtccggttaatgagtgttgtatcatcgcgccatttcaactcacttgccaggccattatagagagtccagacaattccggcgccagcaacagacagtagcaatataaaaagcaaggttaaacggacggttatagatagtcttttcattatttttttaccgctacgaaactatagcccatcccccggattgtggcaattagcttttcaggaaaaggatcatcaacttttgcgcggagcctgcgaatggcgacgtccaccgtattggtatcactatcaaagttgattccccaaatttcactcgcaataaccgttctgggtataatttcgccagctctggaggccagtagccaaagtaactgaaactccttgcgcgtcagtgtaatactgatattgtccctgctcacactatgactaacagagtccattcttaagccgctgatttctaatgtactattcaaagcgtgatgttgccttaattgtgcccgaacccttgccagcaactcagaaaaactaaaaggttttaccagataatcatttgccccactgtccagccctctgactctgtcatcgacagaatcccttgcagtaaggcaaataacaggggtttgctttgctgttcttaacgtttgtaagatctgccagccatccatacccggaagcataatatccagaatgatcaatgcataatcatccttcagcgcaagataaagcccatctctgccatcagaaacggcatcgatgacataacccgcttcggaaagcccctgcgttacccattcctgggtcctttgattatcttcaataagtagaatcttcatgaaaataatatgccataaatcatatgttatagaaacagcctggttcattacaaaattgtaatgctgctgtaaggttaccctggacgctttttcgctatcctcaaaactcattcacatgacaaggatataaacatgttaaagcgttatttagtactcagcgtagcaacggcagcatttagtttaccttctttggttaatgccgcacaacaaaacattcttagcgtgcacattttgaaccagcaaacaggaaaacccgctgctgacgtgacagtcactcttgaaaagaaggcggataacggctggttacaacttaataccgccaaaacagataaggatggacgaattaaggcactgtggcccgagcaaactgcaactacgggcgattaccgtgtcgtatttaaaaccggggactatttcaagaaacaaaatcttgaaagtttcttccctgagatccccgttgaatttcatattaataaagtgaacgagcattatcatgtgcctttattacttagccaatatgggtatagtacctatcgtggcagttaatgcataaatatgtaaaagcagatctctgctactgttagggaggacactccctgacagattaacagtaaacggctcttgctggctaacgacaaaaaagtgtgatggcttatgaaaaagaatcaatttttaaaagaaagtgatgttacggccgagagcgtattctttatgaagcgtcggcaggtgttaaaagcactgggcatcagtgcaactgcactttctttgcctcacgctgcgcatgccgatctgcttagctggtttaaagggaacgatcgcccgcccgcccccgccggaaaagcgctggagttcagcaagcctgccgcctggcaaaataacctgccactgacgccagcagataaagtttccggttataataacttctatgaattcgggctggataaagccgatcccgccgctaatgctggtagcctgaaaaccgatccatggacactgaaaatcagcggcgaagtggcaaaaccattgaccctcgatcatgatgacttaacccgtcgcttcccgctggaagagcgtatttatcgtatgcgctgcgtggaagcgtggagcatggtggtgccgtggattggttttccgctgcacaaattgctggcgcttgccgaacctaccagcaatgcgaagtatgtcgctttcgaaacaatttatgcaccggaacagatgccaggccagcaggaccgctttatcggcggtgggctgaaatatccttatgtcgaaggattgcgtctcgacgaagcaatgcatccgctcacactgatgaccgtaggtgtttatggcaaggcgttaccgccacaaaatggcgcgccggtgcgactgattgtgccgtggaaatatggctttaaagggattaaaagcatagtcagtattaagctgacccgcgagcgtccgccaaccacctggaatctggcagcgcctgacgaatacggtttttacgccaacgttaatccgtatgttgatcacccgcgctggagtcaggctaccgaacgatttattggtagtggcggcatcctcgatgtacagcgccagccaacgctactgtttaatggttacgccgcccaggtggcaagcctgtatcgtggcctggatttgcgggagaatttctaaatgcgtctgacagcaaaacaggtgacatggctgaaagtttgcctgcatcttgccggattgttgccgtttctctggctggtctgggcgatcaatcacggtggactgggtgccgatccggtgaaagatattcagcattttactggtcgcactgcactgaaatttttgctggcgaccttgttaatcacccctctggcacgctacgcaaaacagccgttattgatacgcactcgccgcctgttaggattatggtgctttgcctgggcgacactgcatttaacaagttacgcattgctggagctgggcgtgaataatctggcgttattaggtaaggagttaattacccggccttatttaacgttaggtattatcagctgggtaattttgcttgctttagcgttcactagtacccaggcgatgcagcgaaaactcggcaagcactggcaacagttgcataatttcgtctatcttgtcgcgattctggccccaatacattatctgtggtccgtgaagattattagtccgcagccgctcatctacgctgggctggctgtactgcttttagccttacggtataagaagttgcgttccctttttaaccggttacgcaagcaggttcacaacaaattatctgtataacttcatattgccgacaaagtacgcgttatccctgccggatgtggcgcgagcgccctatccggcatacacagatcgcatcaggttatgtttcgtttgtcatcaacctcaaatcaccaaaataatttattttatttcaataagatagataagtagaactgagaaagccatgctctcgtttcctaagagttgttgcattttgctatatgttacaatataacattacacatcatatacattaactctggaggaaactgttttggcgattcgtctttacaaactggctgttgctttaggtgtctttattgttagcgctcctgcctttagccatggtcatcacagtcacggcaaacccttaacagaggtcgaacaaaaagctgctaatggtgtttttgatgatgccaatgtacaaaaccgaacgctcagtgactgggatggagtctggcaatccgtttatcctttactgcaaagtggcaaacttgaccccgtctttcagaagaaagcggatgcagataaaactaaaacatttgctgaaattaaagattattatcacaaaggttatgcaacagatatcgagatgattggcattgaggacggcattgttgaattccatagaaataatgaaacaacaagctgtaaatatgattacgatggatacaaaatactcacctataaaagtggcaagaaaggcgttcgttacttattcgaatgtaaagatcctgaaagcaaagcccctaaatatatacaatttagcgatcatataattgcaccacgaaaaagttctcattttcacatttttatgggtaatgatagtcagcaatctttattaaatgaaatggaaaactggccaacgtattatccatatcagttgagtagcgaagaagtggtcgaggaaatgatgtctcattgagtattctcatgataacgcctcgatgccgctttagtaagttatcataactgccactggtccatccacaaacgccactgaacgcaagctagctacagacacgctcatcactatgacgtgtctgtatattaataagctaacccgcattgagttaaccaataacggattccatacacaatacggccaacagagaaagatacctgtgctcacgccattgcttatattggctggttacaatatgcactatcaattttttaaataacaaattattaaaaccacatctgtataaggaatttttaaggttcgtgggatagcttgactgtgaaaatcacaggagctacaaaaatgaaccgattcagtaaaactcaaatttatttacattggataacgctgcttttcgttgcaataacctatgccgcgatggaactccgtggctggtttcctaaaggtagtagtacttatctgctgatgcgagaaacacattacaatgcgggtatattcgtttgggtgttaatgtttagtcgcctgattataaaacaccgttatagtgatccttctattgtgccaccgccacctgcctggcaaatgaaagcggctagcctaatgcacatcatgctttatataaccttccttgcacttcctctgctggggattgctttgatggcttacagtggaaaaagctggagtttccttggtttcaatgtgtctccctttgttaccccaaacagcgaaattaaagcactgataaaaaatattcacgaaacctgggcaaatataggctactttttaatcgcagctcacgctggcgcagcactctttcatcactacattcagaaagataatactctgttacgaatgatgcctcgccgcaaataagtcgatccccttacaaggaaatgtgaaccatggacatcaacgcgtcataaatgtttacgcaagtgcacaatgcaccctttccactatcaacaaggaggagcagaaactgtgtaaatcgtacaatggtaagacttatcaaaaatacaggttaattttggtatttaaaccttttttacttgttagtatgatacaaaggctttcaaaaaagctgcgaaattcaacaactcttggaaattatggactttgtcccgcggctttaatctgacggccgcgttccttttttgactcaattattgaacccttctctacgcaacttcagttcccaccaccaactttgcggcagtttcataggatgaatgtctaaaagaataatggtgagcgataagaaaacgactgaataactgcacattttcgctcgaaagcttcctgtcagatccatagcgaatcaagtgctgaatgtcacagtatcgaacagaaaacagtgacgatctaacccttcaagaatattctacgattgttctgtttaggaaaagaaaggcgggaagtcgggagataagtcattgataaaggttcagatggttgccatgatgccaggaaatttggcattttaacagtccctgtccgtgcaattttgttcaagtgacgagtttgcgagcaaaacgatgattaagtggccctggaaagtacaagaaagtgcacatcaaactgcccttccctggcaggaagcactaagcatcccccttttaacgtgtctgacggaacaggaacaaagcaaattagtcactcttgccgaacgttttttacagcaaaagcggcttgttcctttacagggctttgaactggatagtttaagaagctgccggatagcacttctattttgcctacccgttctggagttaggactggaatggctggatggttttcatgaagtcttaatttatcctgcgccatttgtggtcgatgatgaatgggaagacgatatcggtctggtgcataaccaacgtattgttcagagtggtcagagctggcagcaagggcctatcgttttgaactggttggatatacaagattcttttgatgcttctggttttaacctgattattcatgaagtcgctcataagctggacacccgtaacggcgatcgcgccagcggagttccctttattccgttgcgtgaggttgctggctgggaacacgatcttcatgctgcaatgaacaacattcaggaagaaatcgaattggttggcgagaatgcggcgagcattgatgcttatgcagccagcgatcctgctgaatgttttgccgtactttctgaatatttctttagcgccccagaactttttgctcctcgtttccctagtttgtggcaacgtttctgccaattttatcaacaagatcctttgcagagactgcatcacgctaatgatacagacagctttagcgcgacgaatgttcattaattaacaactttgcagattaattaaccaattgaaatgacttatgaaatttagtgttgacagacaaggtaccgctaagtaatattcgccccgttcacacgattcctctgtagttcagtcggtagaacggcggactgttaatccgtatgtcactggttcgagtccagtcagaggagccaaattctaaaaattcgcttttttagcgcaatgtcactgaccttagttgaacattgttttttaacggatagcgggtttttaacatcttaagcgccctcgacctttatggttgagggcgttttgctatgaacgccatcaccattttcccctcgattataaaacttgagttattcagtagtctcccctcttgcaactcacacccaaaactgcctaacgaaaagttattaattttcaatcatattgctatcagtatttacattttttcgctgtgctagaaagggcgcatttatgttagctcgtagtgggaaggtaagcatggctacgaagaagagaagtggagaagaaataaatgaccgacaaatattatgcgggatgggaattaaactacgccgcttaactgcgggtatctgtctgataactcaacttgcgttccctatggctgcggcagcacaaggtgtggtaaacgccgcaacccaacaaccagttcctgcacaaattgccattgcaaatgccaatacggtgccctacacccttggagcgttggaaagcgcccaaagcgttgccgaacgtttcggtattagcgtggctgagttacgcaaactcaaccagtttcgtacgtttgctcgaggttttgataatgtccgccagggtgatgaactggatgtcccggcacaagttagtgaaaaaaaattaaccccgccgccgggtaatagcagtgacaacctcgagcaacagatagccagtactagtcagcaaatcgggtctctgctcgccgaagatatgaacagcgagcaagcggcaaatatggcgcgtggatgggcctcttctcaggctagtggcgcaatgacagactggttaagccgcttcggtaccgcaagaatcacgctgggcgtggatgaagattttagcctgaagaactcccagttcgattttctccatccgtggtatgaaacgcctgataatctctttttcagtcagcatactctccatcgtactgacgagcgtacgcagattaacaacggcttaggttggcgtcatttcactcccacatggatgagcggcatcaacttctttttcgaccacgatcttagccgttaccactcccgcgccggcattggcgcggagtactggcgcgactatctaaaattaagcagtaacggctatttgcgactgaccaactggcgcagcgcacctgaactggacaacgattatgaagcacgcccggccaatggctgggatgtacgcgcagaaagctggctacccgcctggccgcaccttggcggtaaactggtctatgaacagtattatggcgatgaagtggccctgttcgataaagacgatcggcaaagtaatcctcatgccataaccgctggacttaactatacccccttcccgctgatgaccttcagcgcggagcaacgccagggtaaacagggcgaaaatgacacccgttttgccgtcgattttacctggcaacctggcagcgcaatgcagaaacagcttgacccgaatgaagtcgctgcacggcgtagccttgcaggcagccgttatgatctggtggatcgcaacaacaatatcgttctggaatatcgcaaaaaagaactggttcgcctgaccctgacagaccccgtgacagggaagagtggagaagtgaaaagtctggttagcagcctacaaaccaaatatgccctgaaaggctataacgtcgaagccaccgcactggaagctgccggtggcaaagtggtcacaacgggtaaagatattctggttaccctgccggcttaccggttcaccagtacgccagaaaccgataacacctggccgattgaagtcaccgccgaagatgtcaaaggcaatttgagcaatcgtgaacagagcatggtggtcgttcaggcacctacgctaagccagaaagattccagcgtaagcttaagtacccaaacattgaacgcggattcccatagtaccgccacactgacttttattgcgcatgatgcagcaggtaatcctgttgtcgggctggtgctcagcacgcgtcacgaaggtgttcaggacatcaccctttctgactggaaagataatggtgacggaagctatacccagatcctgaccacaggagcgatgtctggcacgctgacgctgatgccacagctgaatggtgtggatgcggctaaagcccccgccgtggtgaatatcatttctgttagcagttcccgaactcacagcagtattaagattgataaggaccgttatctctccggcaatcctatcgaggtgacggtagaactgagagatgaaaatgacaaacctgttaaggaacaaaaacagcaactgaataacgcagtcagcatcgacaacgtgaaaccaggagtcactacagactggaaagaaaccgcagatggcgtctataaggcgacctataccgcctataccaaaggcagtggacttactgcgaagctattaatgcaaaactggaatgaagatttgcataccgctggatttatcatcgacgccaacccgcagagtgcgaaaattgcgacattatctgccagcaataatggtgtgctcgccaatgagaatgcagcaaacaccgtcagcgtcaatgtcgctgatgaaggaagcaacccaatcaatgatcataccgtcacgtttgcggtattaagcggaagcgcaacttccttcaacaatcaaaacaccgcaaaaacggatgttaatggtctggcgacttttgatctgaaaagtagtaagcaggaagacaacacggttgaagtcacccttgaaaatggcgtgaaacaaacgttaatcgtcagttttgtcggcgacagcagtactgcgcaggttgatctgcagaagagcaaaaatgaagtggttgctgacggcaatgacagcgtcacaatgaccgcgaccgtccgggatgcaaaaggcaacctgctcaatgacgtcatggtcactttcaatgttaatagtgcagaggcgaaactgagccaaaccgaagtgaatagccacgacgggatcgccacagctacgctgaccagtttgaaaaatggtgattatagggttacggcctctgtgagctctggttcccaggctaatcaacaggtgaattttatcggtgatcaaagtactgctgccctgaccctcagtgtgcctagtggtgatatcaccgtcaccaacacagctccgcaatatatgactgcaaccttgcaggataaaaatggcaacccactaaaagataaagaaatcaccttctctgtgccaaacgacgtcgcaagtaagttcagcattagcaacggaggaaaaggcatgacggatagtaacggggttgcaatcgcctccctgaccggcacgttagcgggcacgcatatgatcatggctcgtctggctaacagcaatgtcagcgatgcacagccaatgacgtttgtggcggataaagacagagcggttgtcgttttgcaaacaagcaaagcggaaatcattgggaatggcgtggatgagacaactctgacagcaacagtgaaagatccgagcaatcatccggtggcggggataacggtaaacttcaccatgccacaggacgttgcggcaaactttacccttgaaaataacggtattgccatcactcaggccaatggggaagcgcatgtcacgctgaaaggtaaaaaagcgggcacgcatacggttaccgcaacgctgggtaataacaataccagtgatagccagccggtaacatttgtggcggacaaagccagcgctcaggttgtcctgcagataagtaaagatgagatcacaggtaatggcgtcgatagcgcaacgctaactgcaacggttaaagatcagttcgacaatgaggtgaataatcttccggtaacattcagcagtgcctctagtggactcaccctgaccccgggagtaagtaataccaacgagtctggcatcgcgcaggccactctcgcaggcgttgcctttggtgagaagacggttactgcaagtctggctaataatggtgccagcgacaacaaaactgtgcattttattggcgacacagcggcggcaaaaattatcgagttggcgcctgtcccagacagcataatcgccggtaccccgcagaacagctccggcagcgtcatcaccgccacagtcgttgataataatggctttccggtgaaaggtgtgactgtgaacttcaccagcaacgcagcgacagccgaaatgacgaacggcggtcaagccgtgacgaacgaacagggtaaggctaccgtcacttataccaatacccgctccagcatagaaagtggagcgagaccggataccgttgaggccagtctggaaaatggtagctccacgcttagcacaagtattaatgtcaacgctgatgcgtctacggcacatctcaccttgctacaggcactttttgatacagtctccgcaggcgagacaaccagtctgtatattgaggtgaaggataattacggcaacggtgtcccccagcaggaggtaaccctcagcgttagtccaagtgaaggcgtgacccccagtaataacgctatatatactaccaaccacgacggcaatttttacgcaagctttaccgctacaaaagccggggtttatcaattgacggcaaccctcgaaaatggcgatagcatgcaacaaacagtgacctatgtgccgaacgtcgcgaatgctgaaatcacgctggcagccagcaaggatccggtgattgccgacaataacgatctcacgacactaacagcaacagtcgctgatacagagggcaatgcgatagccaacactgaggtaacatttactctgccggaagatgtgaaggcgaacttcacgctgagcgatggcggtaaagtgattactgatgctgaaggcaaagcgaaagtcacgctgaaaggtacaaaagcaggcgctcatactgttacagcaagcatgactggcggtaagagtgagcagttggtggtgaactttattgcggatacgctcactgcgcaggttaatcttaacgttaccgaggacaattttatcgctaataacgtcgggatgaccaggctgcaggcaacagtgactgatggaaacggcaacccgttagccaatgaggcggtgacattcacgctaccggcagatgtgagcgcaagctttactctcggacaaggcggttccgccattactgatatcaacggcaaggctgaagttacactgagcggtacaaaatccggcacctaccccgtgacagttagcgtgaacaattatggtgtcagtgatacgaaacaggtgactttgattgccgatgctggtaccgcaaaactagcctccttaacctctgtatacagtttcgtcgtcagcacgaccgagggcgcaaccatgacggcaagcgtcactgacgctaacggcaacccggtagaaggcataaaagttaatttccgcggaacctccgtcacgctaagcagcaccagcgttgaaacggatgatcggggtttcgctgaaattcttgtgacaagcaccgaggtcggactgaaaacagttagtgcctctctggcagataaacctactgaagtcatcagccgattactgaatgccagtgcagatgttaattctgcgacgattaccagtctggagataccggaaggtcaggtaatggtcgcacaagacgtagcagttaaagctcacgttaacgaccagtttggcaacccggttgcgcatcaacccgtgacattcagtgcagagccatccagccaaatgatcatcagccagaatacggtctctactaatacgcagggtgtagccgaggtcaccatgacgcccgaaagaaacggtagctatatggtgaaagcatccctgccgaatggagccagtcttgagaaacaactggaggctattgatgaaaaactgacactcacggcgtccagtccgcttatcggtgtctatgcccctacaggcgctactctgacggcaacgctaacctctgcaaatggcactccagtggagggtcaggtcatcaactttagcgtaacgccagaaggggcgacgttaagtggcggaaaagtgagaactaactctagtggtcaggctccagtcgttttgaccagcaataaagtcggtacatatacggtgactgcatctttccataacggcgtaacaatacagacacagacaaccgtgaaagtcactggcaacagtagcaccgcccatgttgctagctttatcgctgatccaagcactatcgccgccaccaacactgatttaagtaccttaaaggcaacggttgaggatggcagtggtaacctgatcgaaggtctcactgtgtacttcgccttaaaaagcggctctgccacattaacgagtttaacagcggtgaccgatcaaaacggaatcgcgacaacaagcgtgaaaggagcgatgacaggtagcgtcacggtaagcgcagtcacgaccgctggtggaatgcaaacagtagatataacgctggtggctggcccggcagacaccagccagtccgtccttaagagcaatcggagtagtctgaaaggggactataccgatagtgctgaattacgtcttgttctgcacgatataagtggcaatccgatcaaagtttctgaagggatggaatttgtgcaaagtggtactaacgtgccctatataaaaattagcgcaattgattacagtctaaatatcaacggtgattacaaagccactgttacaggaggcggagagggtatcgcaacgctgatccctgtattgaatggtgttcatcaagctggtctgagtaccacaatacaattcactcgcgcagaagacaaaataatgagcggtacagtaagtgtcaatggtactgacctaccgacaactacattccctagccaggggttcaccggggcgtattatcagttgaataatgacaactttgccccaggaaaaacggcggctgattatgagtttagtagctctgcctcctgggtcgatgttgatgctaccggtaaagtgacatttaaaaatgtcggcagcaatagcgaaaggattacggcgacgccaaaaagtggaggccctagctatgtatacgaaatccgtgtgaagagttggtgggtgaacgccggcgaggctttcatgatatacagccttgctgaaaatttttgcagcagcaatggctacacgctccccagagcaaactatttaaaccactgtagttcccgaggcatcgggagtctgtacagtgaatggggagatatggggcattacacgactgacgctggttttcaaagtaatatgtattggagttctagtcccgcaaacagtagcgaacaatacgtagtttccctggcaacaggtgatcaaagcgtatttgaaaagcttgggtttgcttatgcgacatgttataaaaacctgtgattttccgttataatttcttaaagagtgttccattcggggcactcttttttacattccctctacagaactagcccttctctcacagaaaatgaataaataaaaatgcggcaccgccagaatcgcgttcgatgtgactatgatcattttcggtgagtactgctttgatctaaaggctggttttctgtgatgattgaccagcctcagagtattgatgacaccaccgttcataacagatcggcattactatgcataagtactgtctcatattctcgccaaaacactttttaatgcctttgcgaattcatccagacttatattgtcaattttttgcccaacgacgactgactccgagacatcggccattgcgggccatcgcgttttgtaatcagcataaattgcaacaacaggggtattataggcacttgccatatgtaatattgaggtgtcaggagttattgcgatataagcatcttttatgattgctgctgaacgtttaatcgagggtggtaaggataaacggtagacattattataacaatccactaatgccctggctttatcttcacctttgggtccatgaacgatcactattggtatatctgtttcactttaaatttttgctattagattttctgcaatcgataatgaaaatgtacgttcctgcgagctaccttctaaattgaacgcaatgtaagatcctaacgatcgcatttcctcgcgcacctcatcgagtacatcctcacttagtggcaattcatatattggcctgactgctggaaaacccgcctcacgcatcataaatgcccatgtcataggtacgggagcccggagtttctgatccatactggacgcgttcttgcacaaaggggagaagcaattcatggttataccaacaacctgaaaattcgtttttgctttcaactgactgataaataacatcgttttcaggttctttttacgcatcccctcaatgcaaagatccggcgtaccgtattgctgtgttatgttctttgctaaatcttttatttcttttaatgttgcgtgatcctgcatagtcattgtgactaatgttaatttagtctgttcaagtttaagcgcattaaagacttctaaattaattgtcgacgttacaattaaaagatgcttaattttatgcaattcaagcgcccgaataacaggaaagatggccatagcatcgccaatctgatcgggaatatggatgacaacaaagtctgttttttcaatattgaaattataagctttataatcgtagtaactaaatgcaatacgtctcaacaatgatgctaaaaacatacctaacctcgcctccctactggttataatgcaatgcagtctatcagactcatcagggtgccattttgtgcatatgcggacttttatgtttcatatctctaacctgtgggtcctctgcttaatccttaaacaacaccagcaactcctgcgctttcatcttccatcgaatttttcatgttgccgctaatcagccataaaatcatttgcagatgcgctctgtcgaggtagtctcataaggttcgtttatagatcgacggcaatgtgagttaccttttccatactaattataaaaagacagtacaaacaggatcattatggactccacgctcatctccactcgtcccgatgaagggacgcttagcttaagtcgcgcccgacgagctgcgttaggcagcttcgctggtgccgtcgtcgactggtatgattttttactctatggcatcaccgccgcactggtgtttaatcgcgagtttttcccgcaagtaagcccggcgatgggaacgctcgccgcatttgctacctttggcgtcggatttcttttccgtccgctcggcggtgtcattttcggtcactttggcgaccgactgggacgtaagcgcatgttaatgctgaccgtctggatgatgggcatcgcgacagccttgattggtattcttcctagtttcagcaccattgggtggtgggcacctattttgctggtgacactgcgtgccattcagggatttgcagtcggcggcgaatggggaggcgcggcgttgctttccgttgaaagtgcaccgaaaaataaaaaagccttttacagtagcggtgtacaagttggctacggtgtaggtttactgcttagtaccggactggttagtttgatcagtatgatgacgactgacgaacagtttttaagctggggctggcgcattcctttcctgtttagcatcgtactggtactgggagcattgtgggtgcgcaatggcatggaggagtccgcggaatttgaacaacagcaacattatcaagctgccgcgaaaaaacgcatcccggttatcgaagcgctgttacgacatcccggtgctttcctgaagattattgcgctacgactgtgcgaattgctgacgatgtacatcgttactgcctttgcacttaattatagtacccagaatatggggctaccgcgcgaacttttccttaatattggtttgctggtaggtggattaagctgcctgacaattccctgttttgcctggcttgccgatcgttttggtcgccgtagggtttatatcacaggtacgttaatcggaacgttgagcgcatttcctttctttatggcgcttgaagcacaatctattttctggatagttttcttctccataatgctggcaaacattgcgcatgacatggtggtgtgtgtgcaacaaccgatgtttaccgaaatgtttggtgccagttatcgctatagtggcgctggagtcggttatcaggttgccagtgtggttggcggtggatttacaccttttattgccgctgcactcatcacttactttgccgggaactggcatagcgtcgccatttatttgctggctggatgcctgatttccgcaatgaccgctttgttgatgaaagacagtcaacgcgcttgatagcctggcgaagatcatccgatcttcgccttacacttttgtttcacatttctgtgacatactatcggatgtgcggtaattgtatggaacaggagacacacatgaataataagggctccggtctgaccccagctcaggcactggataaactcgacgcgctgtatgagcaatctgtagtcgcattacgcaacgccattggcaactatattacaagtggcgaattacctgatgaaaacgcccgcaaacaaggtctttttgtctatccaagtctgaccgtaacctgggacggtagcacaaccaatccccccaaaacgcgcgcatttggtcgctttacccacgcaggcagctacaccaccacgattactcgccctactctctttcgtagctatcttaatgaacaacttacgttgctgtatcaggattatggtgcgcatatcagtgtgcaacccagccagcatgaaatcccttatccttatgtcatcgatggctctgaattgacacttgatcgcagtatgagcgctgggttaactcgctacttcccgacaacagaactggcgcaaattggcgatgaaactgcagacggcatttatcatccaactgaattctccccgctaagccattttgatgcgcgccgcgtcgatttttccctcgcacggttgcgccattataccggtacgccagttgaacattttcagccgttcgtcttgtttaccaactacacacgttatgtggatgaattcgttcgttggggatgcagccagatcctcgatcctgatagtccctacattgccctttcttgtgctggcgggaactggatcaccgccgaaaccgaagcgccagaagaagccatttccgaccttgcatggaaaaaacatcagatgccagcatggcatttaattaccgccgatggtcagggtattactctggtgaatattggcgtgggaccgagtaatgctaaaaccatctgcgatcatctggcagtgctacgcccggatgtctggttgatgattggtcactgtggcggattacgtgaaagtcaggccattggcgattatgtacttgcacacgcttatttacgcgatgaccacgttcttgatgcggttctgccgcccgatattcctattccgagcattgctgaagtgcaacgtgcgctttatgacgccaccaagctggtgagcggcaggcccggtgaggaagtcaaacagcggctacgtactggtactgtggtaaccacagatgacaggaactgggaattacgttacagtgcttctgcacttcgttttaacttaagccgggccgtagcaattgatatggaaagtgcaaccattgccgcgcaaggatatcgtttccgcgtgccatacgggacactactgtgtgttagtgataaaccgttgcatggcgagattaaacttcccggccaggctaaccgtttttatgaaggcgctatttccgaacatctgcaaattggcattcgggcgatcgatttgctgcgcgcagaaggcgaccgactgcatagccgtaaattacgaacctttaatgagccgccgttccgataataagttctgaaccttcttatcagaaatagatgtgaaggagtaagtaagacacctggcaaatagcctgcaataatcgtgggctgtttgcttccttgggcggatacgagttttattatcgtcttaatgatttccacatattaaaagcaagtatgctttcaaaacacaattataaaaaatcccgccaacaatataagtttttataaaattaaatataagattatggctttagaatatttttatttctaatagacgagatttttcctgttatgatataatatgctgaattaacacatgttaacgatttaccagtaatgtaaataaattttcgaggagatcattccagtgggacgtaaatgggccaatattgttgctaaaaaaacggctaaagacggtgcaacgtctaaaatttatgcaaaattcggtgtagaaatctatgctgctgctaaacaaggtgaacccgatccagaattaaacacatctttaaaattcgttattgaacgtgcaaagcaggcacaagttccaaagcacgttattgataaagcaattgataaagccaaaggcggcggagatgaaacgttcgtgcagggacgttatgaaggctttggtcctaatggcagtatgattatcgccgagacattgactagtaatgttaaccgtacgattgctaacgttcgcacaattttcaataaaaaaggcggcaatatcggagcggcaggttctgtcagctatatgtttgacaatacgggtgtgattgtatttaaagggacagaccctgaccatatttttgaaattttacttgaagctgaagttgatgttcgtgatgtgactgaagaagaaggtaacattgttatttatactgaacctactgaccttcataaaggaatcgcggctctaaaagcagctggaatcactgagttcagtacaacagaattagaaatgattgctcaatctgaagttgagctttccccagaagatttagaaatctttgaagggcttgttgatgcccttgaagatgacgacgatgtacaaaaagtttatcataacgtcgcaaatctctaattatcttttaaagaaatctgtctttacggcagatttctttaatctcatataattcttataaaaaatataatattcaactcgtcatattgattatacccccccgttcccagagaaataatatttattaaaattccagttcttctttttctgattacagaaggcaaagtggcaattacgcatagtttcccgataaagacgcgatagcgacatcccgcataaggcatttttctctttatctttgtacggtacttcatggaacagagtttttgaccttgcgaatcgtgatgtctgttggggagggacaatttgctcactgaagcgtgagactcgattaagcgcacgaaacacagaaatcaaaaaacccggtcacttttttacaaggtaaccgggtaaaaataatttttattttttaactgttttgagactcatagagatgtctcaaaactaaaatttggctcctctgactggactcgaaccagtgacatacggattaacagtccgccgttctaccgactgaactacagaggaatcgtgagaacgaggcgaatattagcgatgcccacccacaatgtcaaagcctgttttttaaatttgaaatcgtttgctgaaataatctgcattttgtcgtttattcgctcacaactggctttttttcacacttttgcggctcgggtcgagggtatttccatagccaacgtccagtaaccattcgccagtaaaacagcacggcccgcacagcccagtcggcaaacattcccatccagacaccaaccacaccccagccaagcatgattcccagcacataaccgactacaacccgacaaccccacatgctcaacatgctaacccacatggcgtaacgggcatcacgagcacctttaaatccagcgggtagcacccaactggcggaccaaataggcataaataaagcatttagccaaatcagaatcacaacgacatgtttaacctgtggatcctgggtgtaaaagcttgccataaccccggcaaagggagccgttagccaggcgatggccgttaatccaagagtggaaagccagaacacatgccgcaactgaatctctgcttgcgctatctgccctacccccaaccttcggcctgtaatgatcgtagaagcagagccgagcgcacttccgggtaagttgataagagccgcaatactaaacgcgataaaatttccggcaataacactggtccccatcccggcaacgaacatttgggttaataaccgaccactggtaaataacacactttcgacactcgcgggaataccaatccccatgacttcccagataatgctaaaattcagcggtttaaaatagctctttaagctaatccttagcgcaggattaaaaccaatcgccagcacccacaaaattgcaactgcgccaatataacgagaaatggttaaacccagccctgccccgacaaatcccagtcccggccaggagaaaaggccgtaaatcaatatgccgctaataataatattaagaatattcaggctaccgttaatcaatagcggtattttcgtattccctgcaccacgaagtgccccgctaccaataagagtgatggcagctgctggataactgagtaccgtcagctccagataagtcaacgccagtgctttaacttctgtcgtggcatcacccgcgacgaaatcaataatttgttcgccaaaatgatgaataagcgttgccaacagtacggcaaacaacgtcatgatcaccaaactctgccgcgtcgccaccctcgctcgtcgtcgatcccgcttaccgagactaaatgccacaacgacagtagtaccaagatcgatagcagcaaaaaaagccataatgaccatattgaagctgtccgccaatcccacgccggccatcgcatcttttcccagccagctgaccagaaaagtgctcagaacccccatcaacaggacacaggcattctccatgaagataggaacagcaagcggggttatctcgcgccagaacaacactttgtagctcttgcgtttagcgtgccagcgagtgccgtgaacaacctggcgtaaagcagaggagatattcaaagcgctccttaattgcagaaagtgaaaccacatttcaaataaactgggagaatcagcaaagctgcaaagattttcgccaacaaattgtctgcaaatgcaacaaactgtacttagaaacggcaaacagttggggaatttaaaaatcgggttactcaaaagatttttcgccgttaagatgtgcctcaacaacgattcctctgtagttcagtcggtagaacggcggactgttaatccgtatgtcactggttcgagtccagtcagaggagccaaattcctgaaaagcccgcttttatagcgggatttttgttatatctgataatcaatttcctcttcactgctttccatcacctgccgcttgatatcctcaacactcagtcctgcattacaaagttccagaaagcgccagacatagttacgctgaagttgtcctcgcttcagtcccaaccagacagtattagcatcaaaaagatgccgcgtatccaggcggattaaattctcttcctcttgttcgccactggattgctcggcaactaatccgatcccaagcccaagagcaacataggttttaatgacatcagaatcctgcgcacttaatacaatatctgccagcaaacctttgcgggcaaatgcgtcatcaatacgactgcgccccgtaatcccctgtcggtaagtgattaacggccacttcgctatactttccagcgtcaatggactaatttgcgtcaagggatgatcgtgtggaacaagcaaactatggtgccaacgaaaccacgggaaggcgacgagctgcgggtcattactcaaacgctcgctggcgataccaatatcagcttcgccattttgcaacaatgtcgcaatttcctgtggcgtcccctggattagctcgagccgaacctccgggaaaagttcgcgaaaagctttaatgacctctggcaagctataacgtgcctgagtatgcgtcgttgcaatagtgagaacgccagacgtatcgttggtaaacaggtctgcaagccgacgaacattactggcttcattcagaatacgttctgcaatgaccagtaatgctttgcccggttcagtcatgcccagcagtcgcttacctcgtcgaacaaatatttcgatgccaagttcatcctccagttcccgaatatgacggctgacgccactctgactggtaaaaagcatattcgcaacctctgtcaggttgtaatcctgacgtgcagcctcgcggattatctttagttgttggaaattcacggtaaactccgggcagttcagatttcccgttattgttaaagtctaatgcccggcataacaaataataaaaacccgcatcttattccatcccgatataacacttagctcaccaattgccactgccttttttccatcactggagaactaatcacactcattaacaactctttcactgcctgtgcctgtgggcttaagttcgctctggcgggtaaatttaaactcaaagagagactcatggaaggagtggtaatgcgactcatccacccatttactgcgccacataagctacgcgcggcgctttcgggtaatactgcaacgcccatgccgctggcaatcgctgcggtaagcgtggcaatagactcaatttcaccaataacttttgccgtgagtcgccgtagggaaaaagcctcatcaacacgaagtctaatagcactgtaatcactggggagaaagaggttcatttgcgcaatagcattcacatcaacgctttgccccgggcaatcttgagttcctaccagaaaaagatcttctttcagcaaagcctgactggatacaccagccacaggggaatgctcataaatcaccgccatatcgagttggtgatttatcaatttttcgttaagcactgcaccactattttcatgaagatagataacgatctccggaaattcagcgcgaaccgcctgtaataagggcatggtgatggaactcgcagcggttcctggtgcaaagccaatgctgacttgcccgcttaatgcctgaccaacgttatgcaccgccagttgggcctgttcacactgacgtaaaatggcccgcgcatgggtatagagaatttttccggcgtctgttggtgtaacgccccgctttgtacggatcaaaagttgttgatttaactcaccttccagtgtggcaacctgctggctgagcgctggttgtgcgatatgcaatacttcagcagcctgggtcaggctaccaatatctacaatttttacgaagtatttcaggcgtctgaagttcatgttgcctccggtttttaagaatcggcccaagtgccgccattacttacaaccagattgcaagatgcttgccagttttattttggtgttgatgtacaagctaaccaactgtcaaataagagattatgatagattcgtcatttgctcctttaatcagctgtcgcgttcccctgccctataaaaggagggtatgcaccacgatggttcattacccaataagattgaaagctcaccactttgttgaaattgacagcaaacaaacaaaaaaatgcatttcaccctttgacatcaccatgcactgccattaatatgcgccccgttcacacgattcctctgtagttcagtcggtagaacggcggactgttaatccgtatgtcactggttcgagtccagtcagaggagccaaattcaaaaaagcctgctttctagcaggctttttgctttctaattaccaacgctcttaaaacatctgtctactaccagaactaatttgcacaggcattccgcttcgacgttgcaacgcagcatttgcgcgatttacatcaacttcttgcccgttgataaacgcccgcaaagatggggttaccggcaatggcacttttcggtcagactcatattctgcacgattgcggctcaatggctcatgaacttccagccagttgctgccatctggttcagtggtgtattttactggctggtcgataatttgcacacgcgtcccaacaggaacattatcaaacagatatttgatatcgtcattgcgcagacgaatacagccctgacttacccggagcccaataccaaaattggcattggtaccatggatggcatacaacctgccaatataaatcgcgtacagccccatgggattatcggggcccgcaggaacaaatgcgggcaaactctcccctcgtttcgcatattcgcgccgagtgttcggcgttggcgtccaggttggagcttcttgtttacgttcaacggtagtcacccagttacgcggggtttctcgcccagcctggccgataccaataggaaagacttccacagtattactgtctggtgggtagtaataaagacgcatctcagcgacgttaacaacaatccctttacgaacagtgtcgggcaaaatcagttgctgcggaatggtgagttggctgccagacttcggcaaaaaaacatcagcgcccgggttcgcttccagcatgttacttaacccttgcccgtattgtgcggcaaaagtctccagcggctgggtattgtgatcaggaacagttacagtaaagctctgccccactaaacggctaccctctggaggtaatggataagttaccgccaggctagtatggctggcaaaaagcagagcaaaactgcaaagaatatttacacgacgcatcatgtccctttcctatgtcgcgaaagctatccgttaagtatagcttttatcagacttttcgtttttaactgttcaaatcagaagtcgtattccccggtagaacaatattactggcagcaagttcgcccatgttgttgtatatcgcacaggcagcttcgatgatgggcatcgccagagctgcgccactcccctcacctaaacgcatctccatattgagataaggctccagccccaaatggctgagcgctatacgcgcgcctttttctgcgctcaggtgagaaggaatgagatacggtttgatcgcaggagacatctggcaggctgcgagcgcagcagcataagaaagaaatccatccagcaacacgggtaaaccgcaggaagcagcacctaacatcactccagctattccgaccaaatcaaatccacccacttttgccaggacatcaacaccatcctgaggatttggttgattcaacgtaatcgcccgacgcacaacatcaattttattagccagtttatctgtcggcaggtttgcgccaatcccaaccacttcttcaggatcccggccagtgattgtgctgactattgctgctgccggtgtcgtgtttgccatccccagttcacctacaccaaacagcgtgacaccgttttttgccagctcctgcgtataacatatgacgtccaaaagcaacttttcagcctgacggcgactcattgccggagcactagcaatattgccgctacctcgtgcgacacgcatgttgataagcccggggataggctcagcagtatcaataccaacatcaattacgtggacgttagcgcccgcttgttctgccagcacacacacgccggttgttccacgggtcatattttcagcctgtatggctgtcacttcttttggagaaatagcgaccccttcctcccagacgccgtgatcggcacacataaccagtaccgcttttttgcccacatgcggtatgccattcaaccccggcattcctgccagttgtatggcaagcacctccagctttcccaggctaccaacaggtttgagtaacccgtcaatatgccgttgtgcacggctcatagcggtagaatcgatggctgggatcgtattcagtaaatcggcaagtatttgcatctcacgtctctttatagcagtgccagcaggaagaccagttcaccaagctctatggctgctcccagcgtatcgcccgtttgcccgcccagcgtacgtttgagaagctgaccgaggatgaaaatcgccaccatcgtcaccaccatagcagccacaccatgcatacccggcaataatacggcagcaaaaatagcggctaagccgagtgtgacgcaggtttgtcgcccatcaattttgccaatgaacacattgccaagcccttcttcccgcgcataacgatgacgatacatcaataatgcggcagtcccgcggctgaccgcacatgctgccgccaggcttgcaaggatgctttcgccacgcagagccaactcgcttaacaccagaatctttgccagtaccacaaaaatcaatgccagaccgccgtgggtgcctaaacggctatcacgcatgatttccaacatgcgatcgcggctacgtgcagaaaatacgccatcacaggtatcagcgaggccgtccagatggaatcccccggtcatcagcaccagcacaagtacgctaaacagtgccgccagtggtgcgccacaccatgcctgcagcaccatgaagaccagcccgctaatcgcgccaagcaataatccaatcaaaggaaaagtaataataccgcgagaataatgctcgaaatccagtccctgggaccagcgacgcggtacaggcagacgcgtaataaaactgagcatcgcccaaaataatttactcatttgatttttactccaataccgctaaccaccagccatacttcatttgccgcagcggccaactgctgatttacccgcccggcaatatcacgaaaatgtcgtgccagacgactctccggcacaatccccattcccacttcgttagtcactaatacaacctttgcggggcaacgttggcaggcagcaatcaagctctgaatctcagcattaatcgcctgttccatcgcctgataatcccattcatcagggtctttatcgccgccataatcaaacaacagattagtcaccattgtggtaacgcattcaagcaacacaacctcattcgggttaatgtctgcatgaattaattcatcaagatgttgccagcgctccactgtgcgccagtgctccgggcggccttgccgatgatgttctatccgtgcagccatctcatcatcaaggatttggctggtagcgatatacagaacctgactagagtccccaataagcgcctctgcgtggcgactcttcccgctccgtgcgccccccgtcaccaaaatcatcataccgactcctgattcaaatgtatgatggtattcattgaacagaacaatggatcccccaccgttgctgaccgcaaaacatttacgcgattaatactgcgcgtaatataattaaaaatccagcattctcaatccattacgaaataagatggcattacggaatagccagactttctcgtgttaacgtccgacaaaatgcgtcattgacagcggtttctgtggattgacacatttcattcagataatgaattaatgctactgccggaacaaccagcaaacgggcattgtgttctgaaatccaggctattgattcaacgtcagcgacagatctgcgctgtaaaagaacttgtaaaacaacgtaatagaattatccggaatggtggcgactatgcactagggaaggtgcgaataagtggggaaattcttctcggctgactcagtcatttcatttcttcatgtttgagccgattttttctcccgtaaatgccttgaatcagcctatttagaccgtttcttcgccatttaaggcgttatccccagtttgcagaaactccgtaatgagattaaaagcgctcataactcatctgtcggccagaaggcgcgcctctgaattatccgacggacaaaccgggaacagtgtaatttcccggcaggagcgaaaaaattgaaaggcgcatcttactcttttcgctttcaaaaaaaagagtggtcatcgcgttaacacaccgccctgagatgaattagtgatgttttggctgcaccgcaacatacatttcgatatcccagtacccatcttccgcgccattgttcaaataaacctcgaagcagggctttggtaacatttcataagcactgtcctgcaagagactattaaagaactgataccagggtttagcaaaatcatcaccgactacacgagctaccgccaccgcatactgaccacctgtaatttctgtcagaatgacgccctcactgttttcgggaagcgtaaagtaacccggcaccgtcacgacggtgtcgcagcgtaatttttcggcgggtgtttcatctggattgtcgtaatagacagcaacccactccttcggcacaatatttttgctatctacccacatcatcaactgctcaaagcctttctttaccgtctgttcccacgggccaacgagatggaaacctgcaacggtacgtttctcttcctgcttaatctcgtagttcatgacgcctccattgatactgtttttatatacagtatagttgcaaaattaaaaccacaaggaatgagtgttgattatgcgagcagactcgcactcctgccagtctgctgcaaaagaaaggtcaggccttatggtggaaataatcactcaggcgagaaaacatgctgccttccccgacagattccagggtaaccagcggccagtgcgccacctgtttatcacggtcgtaaagttcaatttcccctacccgctgatgggcgctaattggcgcggtgagttctttaccatcaagggtatatttggctttgatatgtggaatttcggctttcggtagcaccatccagaactcttgttccgttcccaggtcgatattttctttatcgccataccagatgcgttccgttccgacctttttcccacggtgcaaaatttgcaccgtagtaaagttttgttgcccccaacgcagtaattttcttgcctcttcctcacgaccttttgcactgtcagcccccattaccactgcaatgagacgacgctgcccatctacagcgctagcaatgagattaaacccggcaccagaagtatgacccgttttcaggccgtcaacattcatggttttatcccacaacaacccgttacggttttgctgggtgataccgttccaggtgagacttttctcactgtacatatgataaaactcgggctcgccgtggatgatagcacgagaaagcacagctaaatcataagcgctgctatgctggccaggtgcatccagaccatgcactgtttcaaaatgcgtatccttgagatgcagcttctcggcatagttgttcatcatttcaacaaactgccgttgcccaccggcaatatagtcagccagagcaacacaagcgtcatttccggaatccacaattaaaccacggcttaaatcacgtacgcttacgcgatcgccctctttcaaaaacatcagactagaaccgacaaacaccggattatctttcgcccacgcatcgcgccccacggtgacaatatcgtctggcgtaatgcgatgactatcgatagcgcgatccacgacataacccgtcatcagctttgtcaggctggcgggattgcgctgttgatgctcattacccgcggtgaggatctgaccggtggtgtaatccatcaatacccaggacccggcatgaatctctggaggctgaggactaaaaggaatgttttccgccgcaaaaccagagcttaagttaaaaacgaacaaagaagcagcaataataagacggcgtttcaacagcaaaccctcaggagtttcaaatagctgttctttttacggaaatacttatgaactggctggaataaagtgcaagaaaatgtgactaccctctcatttttatctgacatgatctgttgccactcgctgccaaattgtggcgctaaagctgattagcacggtgatatttgatactctggcagacagcagaaataacggatttaacctaatgatgaatgacggtaagcaacaatctacctttttgtttcacgattacgaaacctttggcacgcaccccgcgttagatcgccctgcacagttcgcagccattcgcaccgatagcgaattcaatgtcatcggcgaacccgaagtcttttactgcaagcccgctgatgactatttaccccagccaggagccgtattaattaccggtattaccccgcaggaagcacgggcgaaaggagaaaacgaagccgcgtttgccgcccgtattcacagcctttttaccgtaccgaagacctgtattctgggctacaacaatgtgcgtttcgacgacgaagtcacacgcaacattttttatcgtaatttctacgatccttacgcctggagctggcagcatgataacagccgctgggatttactggatgttatgcgtgcctgttatgccctgcgcccggaaggaataaactggcctgaaaatgatgacggtctaccgagctttcgccttgagcatttaaccaaagcgaatggtattgaacatagcaacgcccacgatgcgatggctgatgtgtacgccactattgcgatggcaaagctggtaaaaacgcgtcagccacgcctgtttgattatctctttacccatcgtaataaacacaaactgatggcgttgattgatgttccgcagatgaaacccctggtgcacgtttccggaatgtttggagcatggcgcggcaataccagctgggtggcaccgctggcgtggcatcctgaaaatcgcaatgccgtaattatggtggatttggcaggagacattagcccattactggaactggatagcgacacattgcgcgagcgtttatataccgcaaaaaccgatcttggcgataacgccgccgttccggttaagctggtgcatatcaataaatgtccggtgctggcccaggcgaatacgctacgcccggaagatgccgaccgactgggaattaatcgtcagcattgcctcgataacctgaaaattctgcgtgaaaatccgcaagtgcgcgaaaaagtggtggcgatattcgcggaagccgaaccgtttacgcctagtgataacgtggatgcacagctttataacggctttttcagtgacgcagatcgtgcagcaatgaaaattgtgctggaaaccgagccgcgtaatttaccggcactggatatcacttttgttgataaacggattgaaaagctgttgttcaattatcgggcacgcaacttcccggggacgctggattatgccgagcagcaacgctggctggagcaccgtcgccaggtcttcacgccagagtttttgcagggttatgctgatgaattgcagatgctggtacaacaatatgccgatgacaaagagaaagtggcgctgttaaaagcactttggcagtacgcggaagagattgtctaatttgaagcctccgccgctggtacggcggaggacaatgttgagtcaggctttttgaacggtgatgctccacgctgcatcgccaatctgctgataatcggtgatggcatgtccttcttctgccgcccactgtgggattgcttcagttgcctgggtgcaatcaaactcaatcactaactcatcgccgctgaccatttctgccagagctgcttttgcttctatgagtggaaacggacagacctgcgtcaccacatccagctttttaatcaccatctttacaccttacttaatttgccgcagcagttgccagtcgcgccttacgctgcggtcgaacatacacaagccaggacgcagtccagactccgagaatcataaatacaaggccaatccagccctgccaggtcatcattgcagtcataaccagtccattaccgatagagcaaccacctgcaatactggcaccgaagcccatcagtacaccacctaacccgctacgtaatgttgtttgtgcatcagctgcgcgaacgcggaactcacggctcgctttggctgcaataaaactccccacgaagatccctaacaccaggaaaacgccccagttaatgtatttcatgtcacccgcgaccagaaattgcagaatattggccgttggggaagtgattcctaacccaaacatgcgtccggttgcttcactcaggggccaggctaaaagcgcaatcaaaccgatgagtacagctgtgacaaagggatgccagcgtttttcaaacagaatatgagcgatcccggttcggcgcggcggtaaggtcgcgactttgagttttggcttcttcaactctttcatcaccacccagagcgttatcaccagcaaaacggcaaccaacggccacacagacaaattaaaagtctcagcaatagagttatgttcagtactgtagtgctgcaaggtttgatttaaaccactggcatgtggagaacgcatcaccgcactcatcaccatataagtgaaaagcgcgatccaactgccgatcaatccctcacccgcgcgataccaggtcccggtggcacatccacccgccagaacaattcccagcccgaagatatacccacctataacagtaccaagccacgggaacgccccggcttcgtaagtcagtaggcccgcctgaattaacgcaaaaacccccacgctttgtacgctaattgcaatcagcaaggcgtaaaacatgcgattatttttcacgatatacatatcgcgaaaaccacctgtcaggcaaaaacgcccacgctgcatgacaaatcccagcagagcaccacaaattagcccgcttaatatcatactaaacataaattaattaaccagatgaatgttaatgaggaaattattcatgactggtggaatgcagaccaataaccaaattctctaaattagaacaaatggttattaatgaggagttcgatacaaaagaataaaaaaaccggagccaaatgttcattcgactccggtttattattagaaaagatgattatgctacgtcttcgtactgcggaaccggattacggaagctcttggtgacgcaagccaggtaaatcagaccgatagcagcccagatcagacccagaaccatactgctttcttccaggttaacccacagcgcaccaacggtcagcgcaccacacatcggcaggaacagatactggaagtgatctttcagcgtcttgttacgcttctcacggatccagaactggctgatgacgctcaggttaacgaaagtgaacgccaccagcgcaccaaagttaatcagcgccgttgccattaccaggtcgaagttgattgccagcagggcaatcgcgccaaccaggatgatgttcatcgccggagtacgccatttcgggtgtacataaccgaagaagcttttcgggaatacgccgtcacgacccattacgtacatcagacgcgctacgcctgcatgcgccgccataccggacgccagtacggtaatggtggagaagatcagcgcgccaacctggaacgctttacccgcaacgtacagcatgatttcaggctgactcgcatccggatctttaaagcgagagatatccgggaagtacagctgcaggaagtaagttgcaaagatgaagatcatgccgccgatcagcgcggtcaggaaaatcgcacgcgggatcacgcgctctgcatctttggtttcttcgctcaggttgctgatgccgtcaaagccggtaaaggagaagcacaggattgtcgccccggtaatcatcgggataacatgcgcatcgccagaccagaatggacgagtgctcgccagcgtaccagcgccttcaccttcaaatacgccataaacaaccatgcccagaatcaccgcgatcagcactacctgcaacacgacgattacagtgttgaagttcgctacggatttcagactacgcaggttaaaggcggtcataaaggccaccagcgccaccacaaacatccagcttgggatggaaggcaccagagcttcaaaatagattttcgccagtagaatgttgatcatcggcgcgaacagatagtcgagcagagaagaccaacccaccataaagccgacagtcgggctaatggatttctgggcgtaagtgtatgcagagccagcagaaggatagcggcgaaccagcttcccgtagctcagagccgtaaacaggatcgcaatcaatgcgaacgcataggctgtcggcacatgaccatccgtgaggccactaacgataccaaaagtatcaaacagcgtcatcggctgcatataggcaagacccatcattacaaccggaactaacgtaagcgttttacgcaattccacgcgagaggtgtttggagtaacgttatggctcatggtcattctcctttacggtgataaccgtcgcgtaagcaaaaaattgccccatttttttggattcctcagcgacaacaactgtcgatttttagtaaatatctatccggtacgaagcccggcctcttggtatgaatgattggtttgaagcaaaaaataaccgacgctgatgaaacgtcggtttttagtcattttttgacagcggcgcattgtgcctaaatgggggggaaatgacaagagaatgagaggcttgtcagaataatttttctttaaatggcactttttccgtcatcagattttgcataaacaccggcgatcgcactatttgctaaaatttcatcccgccaccagccactggcaagtcctgcggtctgttcgttccagccaatccagacgggttcaaagagagtttgggcgaccactttcttctcgattaacgcgccactatcgagaaaacgttgcgccagataacggggtaaatagccgcagccgaggccgctaatttgcagctccagtttggttttaaaatcgaaaacggtaatggcttcttgttcgtcgagaagttgacttgccgtagaagcgcctgcctgcgcagtatcccccaccacaatcgcccgatatcgcttaataatacgacgatttaacggctcttcttccagggctaacggatgatgaggcgcgaccgcaaagacttgttccagatcgcccaaccgactaaaaccaaactcactggaagatggtggctcatgcatcgcgccaacaataatatccgctcgcccctgagtcagggcatcccaactaccaccgagtacgccattgataaacttcaggcgcgtcacgctatgatgttgataaaaagcttcaatgagtggcgcaagcagagaaaaaggaaacgtgtcgtccacgccaatcaccagctcgttttcccagccttcatgcagtttgatcgcctgcttttccagttcccgcacggtatgcagaacttcccgccctttctctaataacatttttccggtgcgggtgaatttagcgcggtgtccgctacgatcaagcaattgaatattaaggtcgctttccagcttgtgaacggtgtaactcagagcggacggcgtcttgtagagtttggcgctcgccgccgcaaaactgccttctttttctaaggcatcgaggatcatcaacacatccagcagtggtttcatacacgcccccttgcagtgcatgcggcgtcctgctggcgtgatcgtttactccagcggcattaccagcggatcgggatactggtattcaaatcccagttcattacaaatccgactgccatcaataatcttacctttgccgctgtccagactatttctgaactgcggaggttccagccccagtaaacgggccatctgcggatagaaaacattacgcgcagggtgagctggcgcacatatattatagatgtgtccgcctttaggtgcctgtaacaacagagtgatagcgccaataacatcttctaaatggactaaattaacaccatgttcaccatcaggcgcggtttttccggcaaagaagcgtccgggatgacgtcccggtccgaccaggcccgcaagacgcagaatatcgacgctagtaccgggtaaattgtgcagccagtcttcgagttcttctaatactcgtccactgttggttactggattacgcggggtggtttctttcaccgtgccttgcgcgtcgccatagacagatgtactgctggtaaaaataatgcggggaatacgatgggccagcgcgctatccactaactcttgtaccgcttgtaaatagaactcatcgccggggccgctacgacgtgccggaagcgtaatgaccagcgcatcggcatccatcagggcatccagatcgtcagaatcgcaaactagctcaggctccatgcgaagcagatagctatcaatgccactcattcgggccgcttcgacaccatcttgtgtggttttactcccggtgacttgccagcctcgcgcactaagactcatcgccagcggcatgcctaaccaccctaacccgacaattgcgacctttttcatccgttatctcctgatacaccttagatctataaggctacgctagcgtatcaaaactgacaattcattctatgaatgaatctgttcaataatgataacgacatgctgcaatgagcagactatcgtcggtaaccgcgtataccagacggtgctcctctgtaatgcgtcgggaccagaaaccactcaaattatgtttcaggggttctggcttccccttaccttcaaatggcgttctgcgggtatctttgataagttcattgatctttttaacaattcgcttatctgtttcctgccagtacagataatcgtcccaactttcctcagaccagattagtttcactcaatgatgtccttttccgttcctttgccacttttcaggctatcgatactgtccatcaatctccgggcgttagcgggggagcgcagtagataagccgtctcttccaggctgttgtattcttcgagactcatcagaacacaagcctctccattctgacgagtaataaggatcggggcatgatcttcaacggctttcatcattgttgcgctcaaattctgacgcgcttcgctgtagctaattgtacgcatgtcaatctcctcttttgtacagttcattgtacaatgatgagcgttaattaactatttattaattagtttgtagatcaaggtattgtcagtgagacgaaaatccaggcttcgctatttttggtgccatcagctaagaggacagtcctcttagccccctcctttccccgctcattcattaaacaaatccattgccataaaatatataaaaaagcccttgctttctaacgtgaaagtggtttaggttaaaagacatcagttgaataaacattcacagagacttttatgacacgcgttcaatttaaacaccaccatcatcaccatcatcctgactaatctttcaggcgatgtgtgctggaagacattcagatcttccagtggtgcatgaacgcatgagaaagcccccggaagatcaccttccgggggcttttttattgcgcggttgataacggttcagacaggtttaaagaggaataacaaaatgacagacaacactcgtttacgcatagctatgcagaaatccggccgtttaagtgatgacagtcgcgaattgctggcgcgctgtggcattaaaattaatcttcacacccagcgcctgatcgcgatggcagaaaacatgccgattgatattctgcgcgtgcgtgacgacgacattcccggtctggtaatggatggcgtggtagaccttgggattatcggcgaaaacgtgctggaagaagagctgcttaaccgccgcgcccagggtgaagatccacgctactttaccctgcgtcgtctggatttcggcggctgtcgtcttagcctggcaacgccggttgatgaagcctgggacggtccgctctccttaaacggtaaacgtatcgccacctcttatcctcacctgctcaagcgttatctcgaccagaaaggcatctcttttaaatcctgcttactgaacggttctgttgaagtcgccccgcgtgccggactggcggatgcgatttgcgatctggtttccaccggtgccacgctggaagctaacggcctgcgcgaagtcgaagttatctatcgcagcaaagcctgcctgattcaacgcgatggcgaaatggaagaatccaaacagcaactgatcgacaaactgctgacccgtattcagggtgtgatccaggcgcgcgaaagtaaatacatcatgatgcacgcaccgaccgaacgtctggatgaagtcatcgccctgctgccaggtgccgaacgcccaactattctgccgctggcgggtgaccaacagcgcgtagcgatgcacatggtcagcagcgaaaccctgttctgggaaaccatggaaaaactgaaagcgctgggtgccagtagtattctggtcctgccgattgagaagatgatggagtgatcgccatgagctttaacacaatcattgactggaatagctgtactgcggagcaacaacgccagctgttaatgcgcccggcgatttccgcctctgaaagcattacccgcactgttaacgatattctcgataacgtgaaagcacgcggcgatgaggccctgcgggaatacagcgcgaagtttgataaaaccacggttaccgcgctgaaggtgtctgcagaggagatcgccgccgccagcgaacgcctgagcgacgagctaaaacaggcgatggcggtggcagtaaagaatattgaaaccttccacactgcgcaaaaactgccgccggtagatgtagaaacgcagccaggcgtgcgttgccagcaggtcacgcgtccggtagctagtgttgggttgtatattcctggcggctccgccccgctcttcagtacggtattaatgctggcgactccggcgagtattgcgggctgtaaaaaagtggtgctgtgcagtccgccgccgattgccgatgagatcctttatgcggcgcagctgtgcggtgtgcaggacgtgtttaacgtcggcggcgcacaggccattgccgcactggcgtttggtacggaatctgtgccaaaagtggacaaaatcttcgggccgggtaacgcctttgtcaccgaagcgaaacgtcaggtgagccagcgtctggacggtgcggcgatcgatatgcccgcaggcccgagcgaagtgctggtgattgctgacagcggcgctacgccggatttcgtggcttctgatttgctctctcaggctgaacacggcccggacagtcaggtgattttactgacgcccgctgctgatatggcgcgtcgcgttgccgaggccgtcgaacgccaactggcagaactgccgcgtgccgaaaccgcccgccaggcactgaacgccagccgcctgatcgtgactaaagatttagcgcagtgcgtggagatctccaaccagtacggcccggagcacctgatcattcagacccgcaacgcccgtgaactggtcgatagcatcaccagcgccggtagcgtatttcttggtgactggagtccggaaagcgcaggtgattacgcctccggcaccaaccacgttctaccgacttacggttacaccgccacctgttccagcctcgggctggcagatttccagaagcgcatgaccgtacaggaactgagcaaagaggggttctccgcgctggctagtaccatagaaacactggccgccgccgagcgcctgaccgcccacaaaaatgccgttactttgcgtgttaacgcccttaaggagcaagcatgagcaccgtgactattaccgatttagcgcgtgaaaacgtccgcaacctgacgccgtatcagagcgcgcgtcgtctgggcggtaacggcgatgtctggctgaacgccaacgaataccccactgccgtggagtttcagcttactcagcaaacgctcaaccgctacccggaatgccagccgaaagcggtgattgaaaattacgcgcaatatgcaggcgtaaaaccggagcaggtgctggtcagccgtggcgcggacgaaggtattgaactgctgattcgcgctttttgcgaaccgggtaaagacgccatcctctactgcccgccaacgtacggcatgtacagcgtcagcgccgaaacgattggcgtcgagtgccgcacagtgccgacgctggacaactggcaactggacttacagggcatttccgacaagctggacggcgtaaaagtggtttatgtttgcagccccaataacccgaccgggcaactgatcaatccgcaggattttcgcaccctgctggagttaacccgcggtaaggcgattgtggttgccgatgaagcctatatcgagttttgcccgcaggcaagcctggctggctggctggcggaatatccgcacctggctattttacgcacactgagcaaagcttttgctctggcggggcttcgttgcggatttacgctggcaaacgaagaagtcatcaacctgctgatgaaagtgatcgccccctacccgctcagcacgccggttgccgacattgcggcccaggcgttaagcccatagggaatcgtcgccatgcgcgaacgggtagcgtaaattattgcagaacgcgaatacctgattgccgcactgaaagagatcccctgcgtagagcaggttttcgactctgaaaccaactacattctggcgcgctttaaagcctccagtgcggtgtttaaatctttgtgggatcagggcattatcttacgtgatcagaataaacaaccctctttaagcggctgcctgcgaattaccgtcggaacccgtgaagaaagccagcgcgtcattgacgccttacgtgcggagcaagtttgatgagtcagaagtatctttttatcgatcgcgatggaaccctgattagcgaaccgccgagtgattttcaggtggaccgttttgataaactcgcctttgaaccgggcgtgatcccggaactgctgaagctgcaaaaagcgggctacaagctggtgatgatcactaatcaggatggtcttggaacacaaagtttcccacaggcggatttcgatggcccgcacaacctgatgatgcagatcttcaccagccaaggcgtacagtttgatgaagtgctgatttgtccgcacctgcccgccgatgagtgcgactgccgtaagccgaaagtaaaactggtggaacgttatctggctgagcaagcgatggatcgcgctaacagttatgtgattggcgatcgcgcgaccgacattcaactggcggaaaacatgggcattactggtttacgctacgaccgcgaaaccctgaactggccaatgattggcgagcaactcaccagacgtgaccgttacgctcacgtagtgcgtaataccaaagagacgcagattgacgttcaggtgtggctggatcgtgaaggtggcagcaagattaacaccggcgttggcttctttgatcatatgctggatcagatcgctacccacggcggtttccgcatggaaatcaacgtcaaaggcgacctctatatcgacgatcaccacaccgtcgaagataccggcctggcgctgggcgaagcgctaaaaatcgccctcggagacaaacgcggtatttgccgctttggttttgtgctaccgatggacgaatgccttgcccgctgcgcgctggatatctctggtcgcccgcacctggaatataaagccgagtttacctaccagcgcgtgggcgatctcagcaccgaaatgatcgagcacttcttccgtagcctcagttacaccatgggcgtgacgctacacctgaaaaccaaaggtaaaaacgatcatcaccgtgtagagagtctgttcaaagcctttggtcgcaccctgcgccaggccatccgcgtggaaggcgataccctgcccagcagcaaaggagtgctgtaatgaacgtggtgatccttgataccggctgcgccaacctgaacagcgtgaagtctgccattgcgcgtcacggttatgaacccaaagtcagccgtgacccggacgtcgtgttgctggccgataaactgtttttacccggcgttggcactgcgcaagcggcgatggatcaggtacgtgagcgcgagctgtttgatctcatcaaagcctgtacccaaccggtgctgggcatctgcttagggatgcaactgctggggcggcgcagcgaagagagcaacggcgtcgacttgctgggcatcatcgacgaagacgtgccgaaaatgaccgactttggtctgccactgccacatatgggctggaaccgcgtttacccgcaggcaggcaaccgcctgtttcaggggattgaagacggcgcgtacttttactttgttcacagctacgcaatgccggtcaatccgtggaccatcgcccagtgtaattacggcgaaccgttcaccgcggcggtacaaaaagataacttctacggcgtgcagttccacccggagcgttctggtgccgctggtgctaagttgctgaaaaacttcctggagatgtgatgattattccggcattagatttaatcgacggcactgtggtgcgtctccatcagggcgattacggcaaacagcgcgattacggtaacgacccgctgccgcgattgcaggattacgccgcgcagggtgccgaagtgctgcacctggtggatctgaccggggcaaaagatccggctaaacgtcaaatcccgctgattaaaaccctggtcgcgggcgttaacgttccggtgcaggttggcggcggcgtgcgtagcgaagaagatgtggcggcgttactggaagcgggcgttgcgcgcgtagtggtcggctccaccgcggtgaaaagtcaagatatggtgaaaggctggtttgaacgcttcggtgccgatgccttagtgctggcgctggatgtccgtattgacgagcaaggcaacaagcaggtggcagtcagcggctggcaagagaacagcggcgttagtctggaacaactggtggaaacctatctgcccgtcggcctgaaacatgtgctgtgtaccgatatcagccgcgacggcacgctggcaggctctaacgtctctttatatgaagaagtgtgcgccagatatccgcaggtggcatttcagtcctccggcggtattggcgacattgatgatgtggcggccctgcgtggcactggtgtgcgcggcgtaatagttggtcgggcattactggaaggtaaattcaccgtgaaggaggccatcgcatgctggcaaaacgcataatcccatgtctcgacgttcgtgatggtcaggtggtgaaaggcgtacagtttcgcaaccatgaaatcattggcgatatcgtgccgctggcaaaacgctacgctgaagaaggcgctgacgaactggtgttctacgacatcaccgcttccagcgatggccgtgtggtagataaaagctgggtatctcgcgtggcggaagtgatcgacattccgttttgtgtggcgggtgggattaagtctctggaagatgccgcgaaaattctttcctttggcgcggataaaatttccatcaactctcctgcgctggcagacccaacattaattactcgcctggccgatcgctttggcgtgcagtgtattgtggtcggtattgatacctggtacgacgccgaaaccggtaaatatcatgtgaatcaatataccggcgatgaaagccgcacccgcgtcactcaatgggaaacgctcgactgggtacaggaagtgcaaaaacgcggtgccggagaaatcgtcctcaatatgatgaatcaggacggcgtgcgtaacggttacgacctcgaacaactgaaaaaagtgcgtgaagtttgccacgtcccgctgattgcctccggtggcgcgggcaccatggaacacttcctcgaagccttccgcgatgccgacgttgacggcgcgctggcagcttccgtattccacaaacaaataatcaatattggtgaattaaaagcgtacctggcaacacagggcgtggagatcaggatatgttaacagaacaacaacgtcgcgaactggactgggaaaaaaccgacggacttatgccggtgattgtgcaacacgcggtatccggcgaagtgctaatgctgggctatatgaacccggaagccttagacaaaaccctcgaaagcggcaaagtcaccttcttcagccgcactaaacagcgactgtggaccaaaggcgaaacgagcggcaatttcctcaacgtagtgagtattgccccggactgcgacaacgacacgttactggtgctggcgaatcccatcggcccgacctgccacaaaggcaccagcagttgcttcggcgacaccgctcaccagtggctgttcctgtatcaactggaacaactgctcgccgagcgcaaatctgccgatccggaaacctcctacaccgccaaactgtatgccagcggcaccaaacgcattgcgcagaaagtgggtgaagaaggcgtggaaaccgcgctggcagcaacggtacatgaccgctttgagctgaccaacgaggcgtctgatttgatgtatcacctgctggtgttgttgcaggatcaggggctggatttaacgacggtaattgagaacctgcgtaaacggcatcagtgagttgcggggtaagcggatgcgatattgttgccgcatccggcaaaaaaacgggcaaggtgtcaccaccctgccctttttctttaaaaccgaaaagattacttcgcgttgtaattgcgtagagcattacgccccagcacaatccccgcgccaaccatgccacccagcagcaccgccagaatcaaggtaattgcctttttcgggctatcacgacgaataggtaacatcggtttcatcacataacggtaagcatgaatatcaagatcatcaacttttaagctttcgatatccagcaggttttgacgagtctgatagtagtttgggctgaacaccaacggacgggtcgcctcatgcttaatcatgctctccagcgcttcgctccccaaaaggaacaacgtatcttgtgtgatatcttcgccagtctgttgaatctgcggttttgtcacctgcgcctgattcgcatactgcaacgcttcctgaatctgacggatacgcagatctttctgctcctgcgcgactacttcctgcgttcttaaagagtcctgcaagtttttccgtcccagagcaatgttgtctttgagatccttttctagctcttgattcactttatcgtcaacttgctgaatgtattgggccaacttcatttgtgcgccctctgcagtttgcccaacataagaaacagtcaatggtaattgctggttcttaacagaaggttcgatggtaagtttttctcgttcttcctgattatccagcgtttctgctaatgcagagaaggcagaactgaagcgaccaattaacgtctcctgcaaatcgcttactttcggtgcagcctgaccatagataacattcatggcattgttatagccagcaatttgccccacgtcgggctgagtgataattgctgtactcgtccatttctccttcgctactgccaaatatccaatagccagggcaatagccacaatgacggaaatgatgattgtcatcttgccacgccacaactgcactagtaaatcaatcaaatcaatctgttccgggtcatggttttgcccagaaacattattattttctactctcatcattaccctaactgacggaaatttccaagtccgcatagtttagcgataatcctcgtgaatgctataggataagtgataaaaataatgaattgttgtgtaagtaacaaaagacaatcagggcgtaaatagccctgataacaagatgttagtcgctgccaaagagatcgcgggtgtataccttatctgccacatccttaagctcttctgccattcggttagagataatgacgtcggcttgttgtttgaaggtggcgagatcacgttccaggcgagagttgaagaaactgtcttctttcatcactggctcgtagatgatcacttcaacacctttcgccttgatacgtttcataatcccctgaatagaagacgcacggaagttatcactaccgctcttcataatcagacgataaatacccaccacttgcggcttgcgactcaaaatggcatcggcaataaaatctttacgcgtgcggttagcatcgacaattgcgctgatcaggttattcggcacagactggtagttcgccagtaactgcttggtatctttcggcagacaataaccaccataaccaaagctcggattgttgtaatggttgccaatacgtgggtcgagacaaacgccttcgattatttgacgggaattcagacctaaactttctgcatagctatccagttcgttaaagtacgccacgcgcatcgccaggtaggtgtttgcaaaaagtttaatcgcttctgcttcagtggagtcggtaaacagcatcgggatattttgcttaatcgcgccttcctgtaacagagcagcgaaacgttctgcgcgttcactacgctcaccgatgacaatacgactaggatggagattatcgtaaagggctttaccctcacggagaaattccggggagaatataatattttcagtgcgatatttcttatgcatcgctgcggtaaaaccaacgggaaccgtacttttgatgaccataaccgcataaggatttatctcaactacgtctttaattacactttctacactggatgtattgaaataattagttttaggatcatagtcggttggagtggcgatgatgacataatcagcatcccggtaggcttcatttttatctaatgtggcattaaagtgtattttatcactttgcaaaaactgctgaatttccttatcaacaataggagatatccgatcattcagcatagcaacgcgactcggtaaaatatctaatgccacaacctcatgattttgtgcgattagaagcccgttactcaagcctacatagccagtaccggaaatggtgattttcatttcatgctctcagaattaacttaactgtgaatcatgatgtttttagcatcctgataagagctaaaagttttaacgctacgttgttcgatggtcaacgcaacgaaaaacaattcagattttctttataagaatagctgatatttattaagttaatattaagcagtgaaatttagtctataagatatttggcaaaaaaaagcccggtgcaatatacgccgggcctcaattttattgttggttaaatcagattaatccagccattcggtatggaacacaccttctttatcaatacgcttataagtatgcgcaccaaaatagtcacgctgtgcctggatcaggttcgcaggcagaacagcagcacggtagctgtcgtaataggcaaccgctgcggagaaggtcggaaccggaataccgttctgtactgcataagcaacgacatcacgcagcgcctgctggtagtcatcggcaatttgcttgaagtacggagccagcaacaggttagcgatctgtggattttcggcataagcatcggtgattttctgcaggaactgcgcacggatgatgcagccagcacggaaaatcttcgcgatttcgccgtagttcagatcccagttgtactcttcagacgcagcacgcagctgagagaagccctgggcgtaagaaacgattttgcccagatacagcgcacgacgaactttttcgatgaactcagccttgtcgcctgctggctgtgcttgcggaccagagagaactttagatgcggcaacacgctgatctttcagagaagagatataacgtgcaaacacagactcggtaatcaggctcagcggttcgccgagatccagcgcgctctggctggtccatttaccggtacctttgttagccgcttcatccaggatcacatcaaccaggtagttaccgtcttcatcttttttggtgaagatatctttggtgatgtcgatcaggtaactgctcagttcaccgttattccactcggtaaaggtctgcgccagttcttcgttggtgaggttcaggccacctttaagcagagaataggcttcagcaatcagctgcatatcgccgtattcaataccgttgtgaaccatcttcacatagtgacctgcgccatcggcaccaatataggtaacgcatggttcaccgtcttcagctacggcggcgattttggtcaggatcggtgctaccaattcataggcttctttctggccaccaggcataatagaaggacctttcagcgccccctcttcaccgccagaaacaccggtaccgatgaagttaaagccctctgcactaagctcacgattacgacgaatagtgtcctggaagaaggtgttaccaccatcaatgatgatgtctcctttatcgagatatggtttgagggaatcaatagcagcatccgtgcctgcacctgctttcaccattaacaggatgcgacgaggcgtttccagagattcgacaaactctttcaccgtatagtaaggaaccagtttcttgcctggattttcggcaatcacttcttccgtcttctcacgggaacggttgaaaatagagacggtataaccacggctttcgatgttgagcgcaaggttgcgtcccatcactgccataccgactacgccgatctgttgcttggacattacatactcctgtcaggtgtgatcaccgcgctgaatgctcgcggcctggaatgttcgcaaataagtatacaaagtacttattaaagtataaatagcttatccatgcttatatgcttacggctttatatgtctccacatgcgatatttcttaaataatgttttattattaccacttttaattcagggataatgtgaggttattaccctcaaataatatgagataaatagtgctgcaacattgcatttttgccccgatttatccatgatcgaattgtgacatttgtcatacaacgaataggttttgtacttactatggaatggattgccgatccgtctatctgggccgggttaatcacgctgattgtgatcgaactggtcctcggcattgataacctggtctttattgccatcctcgccgaaaaactaccgccgaagcagcgtgaccgcgcacgggttaccgggctgctgctggcaatgttaatgcgcctgttactgctggcgagtatctcctggctggtcaccctgactcaaccgctgttcagcttccgcagctttacctttagcgcccgcgacttaatcatgctgtttggtggtttcttcctgttgttcaaagccacgatggagctgaacgaacggctggaagggaaagacagcaataatcccacacaacgcaaaggtgcgaagttctggggcgtggtgacgcaaattgtggtactggacgccattttcagtctcgacagtgtgattaccgccgtcgggatggtcgaccatttactggtcatgatggccgccgtggttatcgctatcagcctgatgttgatggccagcaagccgttaacgcaatttgttaacagtcacccgacgatcgttattctctgcttaagcttcctgttgatgattggctttagcctggtggcagaaggtttcggcttcgtcattccgaaaggctacctgtacgctgccattggtttcagcgtgatgatcgaggcgctcaatcagttggctatctttaaccggcgacgttttctttccgctaaccagacgctgcgccagcggactaccgaagcggtaatgcgcctgcttagcgggcaaaaagaagatgcggaactggacgccgaaaccgcgtccatgctggtggatcatggtaaccagcagatctttaatccgcaggaacggcggatgattgagcgggtacttaatcttaaccagcgtaccgtcagcagcattatgacgagccgccacgatattgagcatatcgatctcaacgcgccggaagaagaaatccgccagttgctggagcgaaatcagcatacgcggctggtggttaccgacggtgatgacgcagaagatttgctcggtgttgttcacgttatcgacctgctacaacagtctctgcgcggcgaaccgctcaacctgcgggtgttgattcgccagccgctggtgttcccggaaaccttgccgttgttacctgccctggagcagttccgtaatgcccgcacgcactttgcttttgtggtggatgagtttggcagcgtggaagggattgtgacattaagtgacgtcactgaaaccattgccggtaacttaccgaacgaagtggaagagatcgacgcccgccatgatattcagaagaatgcggacggttcctggacggcgaatggtcatatgccgctggaggatctggtgcaatatgtgccgctgccgctggatgaaaaacgtgaatatcacaccattgccgggctgttgatggagtatttgcagcgtattccaaaacctggcgaagaagttcaggtgggggattatttgcttaaaacgttgcaggtagaaagccatcgcgtgcagaaggtgcagattataccgctgcgtaaggatggcgagatggagtacgaggtgtgatggtatcggtcattttacccaatagccgaaaggaataagatgagggaaccgcgccatcggcgatttaccgccgggagcccgggttgccagggtggtggagattgagccaccctggcacgttcaccggcttgagcgttccatagtagcgaggaacatcaagtgaacggaacagccttcgatcttacatattcagaatataatgatgccgccacgaacgcctgatgcgacgctttacgcgtcttatcaggcctacaggactggtcacctggtaacttacatcttctccagcaacttcttcacatctttgccattacgggaatctttattccgctcggcccagtcattcaggcgacgtttcgcttcgtcctgtagatgtttgcgcagtaactgatccacttgcaggctgtaattgagttgctgccagttgccataaacccgcagcggtactggcgtttctttcaggaaatcaatcagtttgctttccccgttccagccacccacgacccgaatatcaaactgggtgtcgcaggtttgatctgccagattcaacatgccttcccctgtcagcgccagcacagggctttgaccttgcatgtcgtttaacgtcacgacgccatccttcaacgtcaaatcggtggtaaagcggtcaagccgcgtcacgttatcaaagttttcagcggccttcacatcaccgccattacgctctaccgcttgctgaatcatctgctggaagttcatcccttccatgcgcgtgtcggtcatttcgacatgtgcctgtccttgccagttgtggcggaatgcgtcggcatctatgtcagcaccggagaaatcaccagccagactcatttttccggtcaagctaatcggatagttaaacgccttcagaatggtaccaatctcaacgttttccagccgtggctggaagtttatccgcggatttatacttgtcgcgtccagcgtgcccggcagactaacctgtccaccgttaagtttgccctgcagttgagtaatttccagcaaaccgctcttgttggtcatttgcgtggcaacatctgtaaaattcattccgcgccagcgcacgttactggcctgcaacaaaatatcagccgtaaagccttgcagtccctgataggccggttcatcaatacggctagaaatgaccgggcgcggcaacgtactttggctctgcccctgctgcgcggcaccgttttcaccattcgcggtttcattaagcgggatgaggttgtcaagattcagttgcgggaattgcagcctcagctgccattccggtttctctgtcagcgtaacctgtgcttgcccgcttagcgtactatcattggcggtcaaactaatttggttaaaactaaggcgtttatgactctcctgccactgggcctggaaactcccctgcccctgaataccttgttttggtaaatcggcaccctgcaactgccagttaatttgttcaatagccgccgttaaatcatgcggataatcagaagcatctaccgtaccgttaagggatatcgtgagatcgcgctgatcgcgattaacccgcccggagaactcaaaactaccacgatgttggggatcttgttccatttgcaggcgaatattgcggattgtcacctgctcgtcatcttcatgctggaacaccagcacgctgtccgccaccttaagactggatatatcaaagctccatccgcgatcgtcactcagatccggcaaggtattgtcgcgcggtgcaaccggagcgtcttcactgcgcaccgcttccgtctgcggcgtcagttggatcactgccccttttagcatcacctgcttaacgctcagttgatgactcagtagtggtaaaagcgccacgtccagacgcatgttgtcggcgcgaaccagtggctggcttgcgccctgggcggtgagagacattcgcccggagaggatactaagctgcggccagacgtgccaacgcagtggcccgtcgagctgcaattgataaccgctacgtgcagcaacttgcttgaccatatagtcgcggaaatcattcggattcaccagcaacactaacgcagataacccggccaccagcacgaccaggagtatcatcagcgtcgtcagaaatcgtctcatggtatcctcaatgggcctgaattagtctttatcgattcggctggctaccgcgccctgctggttgcgatatttcgcatcttcacggcggttgtaaggtcgcaccgccgggccggaaagcggctcaaagctcagcgcaccaattaacatgcccggacgcagcgccagcggcagcttaccggagttgtagaactccagcacaatgcaaccagaccagcccggatcgatgcggtgcgcggtgacgtgcaccatcagccccagacgcgccagactggaacgcccgtccagccagcccaccagatcggctggcagcgtcacgctctccagcgtcaccgccagcgccagctctcctgggtgaagatagaacgcctcgccctcgtcgagaacgatctcatcgctcatcacgcggtcaagcgcggcgctcacttcatctttgggaccgctcagatcgataaacgctgccgtgtgaccacggaaggtacgaaatttattgcccaggcgtacatccaccgtcgcgccgttaatacgctccactggcggacgtgggttgatgctcaaacggccttcatcaagccaggcttcaatatctcggtcacacagacgcatggcattttctcctttcgcgcatcactcccttaacgccaattacgtcaagggcatactaggttatcactgaacggtacacaatttatcaagcttattcaaagaactgacttattttcgctttcaatatatcgatcgcgatgcggtttttcccgccgcgcggcacgataatgtccgcatattgtttagaaggctcaatgaattgcaggaacatcgggcgcacggttttttgatattgcgccatcacactatccatactacgcccacgctcgttaacgtcacgcttgatgcggcgcatcaggcagatatccagcggggtatcaacgaaaatggagaagttaagttcgtcacgcaaacgcgcatccgtcagcaacaaaatgccttcgagaatgatgaccttcttcggctcaaccgtcaccgtttctttcatacgcgtatgttcaacatagctgtaaaccggcaggtcaattgcgctgccgcgtttcaacgcttgtaaatgctcaagcagcagactgtgatccatcgcgctgggatggtcgtagttggtcttaacgcgttcttccatgctcagatggctttgatctttgtaatagcagtcttcgggaattacgccgatgtgttcatcaccgacttgctcacgcaattcacgataaagggtactggcaataagactcttgccggaagcgcttgcgccagcgataccgataatgacgcactgatgagactgatcagtcatatatttagcgacctgattaacctggatgttaggaagggggcgacgaagcgccaaacgcggcaattatagggatttcatccgtctgataccagtcgaatagcgttgccgcgcgctcagagttaattgttgacaaagaattcccgggggcaaattacgttgatcagttttatgtaaggtaaaaaatgttaaacgcagttgcgcaaattatccgcctttacgtcactttatgagcaattcgcatataaaatgtaaaacttttgtactagcataaacacagaaacgaatactggcgaccaggtcttgcggataaagcggtaatgagcaaacaaagtcagcatgtattaattgccctgccccacccgctgcttcacctggtcagtttaggtttagtcagctttatctttacccttttcagccttgagcttagccagtttggcacccaactcgccccactgtggttcccgacgtccatcatgatggtggcgttttatcgccatgccgggcgcatgtggccgggaattgcgctgagctgtagcctgggaaatatcgccgcatccatcctgcttttttccaccagcagcctgaacatgacctggacgaccatcaatattgttgaagccgtggtcggggcagtgctgctacgtaaattgctgccgtggtataaccccttgcaaaatctggctgactggctgcgtctggcactcggcagcgccattgttccgcctctgttggggggtgttctggttgtcctgctgacgcccggagacgatcctctcagggcatttttgatatgggtactgagtgaatccatcggcgctctggcactggtgccgctgggattgttatttaaaccacactatctgctgcgccatcgcaacccacggttgctttttgagagcctgctcacgttagccatcacactgacgttaagctggcttagcatgctgtatctgccgtggccttttactttcattattgtgctgttgatgtggagcgccgtgcgtctgccacgaatggaagcctttttgatcttccttaccacggtgatgatggtgagcctgatgatggccgcggatccccccctgcttgctacgccgcgtacgtacctgatgagccatatgccgtggctaccgtttttgctgatcctgctgcccgccaacatcatgaccatggtgatgtatgcctttcgtgcggaacgcaaacacatttccgaaagcgaaacccactttcggaacgcgatggaatattccgctatcggtatggcgttagtgggcaccgagggacaatggctgcaaaccaacaaagcgctctgccagtttctcgggtacagtcaggaagagctgcgcggactcacctttcagcaactgacctggccggaggatctcaataaagatctccaacaggttgaaaagctgataagcggtgaaataaacacctatagtatggaaaaacgctactacaaccgcaatggcgatgttgtctgggcgttgcttgccgtcagtctggtgcgccacacggatggcacgccgctctattttatcgctcagattgaagacattaacgagctaaaacgcaccgaacaggtcaatcagcaactgatggagcgcatcactctggctaacgaagcgggcgggattggcatctgggagtgggagttgaagccgaatatttttagctgggataagcggatgttcgagctgtatgaaattcctccacatatcaaaccgaactggcaggtgtggtacgagtgcgtgctgccggaagatcgccagcatgccgaaaaagtgattcgtgatagcttgcaaagtcgcagcccctttaaactggaatttcgcattaccgtaaaagacggtattcgccatatccgcgccctcgccaaccgggtactgaataaagaaggcgaagtcgaacgtctcctcggcatcaatatggatatgaccgaagtgaaacagcttaacgaggcattgtttcaggaaaaagagcgcctgcacattacgcttgattccatcggtgaagccgtggtctgtattgatatggcgatgaaaattacctttatgaatccagtggcggagaagatgagcggctggacgcaggaagaagcgttaggtgttccgctcctgacggtgttgcatattacttttggcgacaacggaccattaatggagaacatttacagtgccgacaccagtcgttccgcgatcgagcaagatgtggtgttgcactgtcggagcggcggcagttacgacgtgcattacagtattacgccgttaagtactctggacggcagcaatattggtagcgttctggtgattcaggacgttaccgaaagtcgcaaaatgctgcgccagctgagctacagcgcctcccatgatgcactgacgcatctcgccaaccgcgccagttttgagaaacaactgcgtatcctgctgcaaacggtaaacagtacacatcagcgacatgccctggtgtttatcgatcttgatcgctttaaagcggtgaatgacagcgccgggcatgcggcgggtgacgctttgctgcgcgaactggcgagcttaatgctgagtatgctgcgttccagcgacgtgctggcgcgactcggtggggatgaatttggtctgctgctaccagactgtaatgttgaaagcgcgcgttttatcgctacacgcattatcagtgccgtgaatgactatcactttatatgggaaggccgtgtgcatcgggtaggtgccagtgccgggattaccttgattgatgacaacaatcatcaggcggcagaagtgatgagccaggctgatatcgcctgttatgcctccaaaaatggtggccggggccgggtgacggtttacgaaccgcagcaagctgccgcacatagcgaacgggcggcgatgagccttgatgaacagtggcggatgattaaagagaatcagttgatgatgctcgcccacggtgtcgctagcccacggatcccggaagcgcgtaatttgtggctgattagtcttaagctctggagttgcgaaggcgagattattgatgaacaaacatttcgtcgtagcttcagcgatccggcgcttagccatgctcttgaccgccgggtattccacgaatttttccagcaggccgcaaaagcggttgccagtaaaggcataagcatctccctccccctttccgttgccggtttgagtagcgccacgctggtgaatgatctgcttgagcagctggaaaatagccctctaccaccacggttattacatctgattattccggctgaagcgattttagatcacgcagaaagcgtgcaaaaactgcggctggcgggatgtcggatagtgctcagccaggtgggccgcgatctgcaaatcttcaacagcctgaaagcgaatatggcagattacctgctacttgatggtgagttatgcgccaacgtgcagggtaatttgatggatgagatgctgattacgattattcaggggcacgctcagcgactcgggatgaaaaccatcgccgggccagtcgttttacccttagtgatggatacgctttctggcatcggcgtcgatctgatttatggtgaggtgattgccgatgcccaaccgctggatttgctggtgaatagtagttatttcgcgattaactgaggcgtgcttccccatcgcctgatgcgacgctaacgcgtcttatcatgcctacaaatcgctcattccccaggccggataaggcgctcgcaccgcatccggcgaccaacgtcatgcttcgtctggttgccagccttccgtataccagatatgcaacagcgcataagaacgccagggcttccagcgctcggcataacggcggatttgcgccggtgtcattcccggaaatcgctgtttaatcagataatcatccggcaggaaaacatctttcgcctgccagccacgcaaagcaaaataattcgccgtccagcgcccgatacccggaaaagtttgcagcgttttcatcgcctgctccacatcgcccggtattgtcattggtaaggtgccctccagcgccgcatttgccagatgaatcagcgcctctgcccgtttcaacggcatacctaacgcttttaatgcctgcgggtctgctgctgccagccgctgaggcgtcgggaagcagatatactccggaaaatcatccagccgttcgccataaagctgtgccactctggcggtcaattttgccgccatcgccacgctcaccagttggcctaaaatcgcccgcacgccctgctcaaaagcatcaacacagccgggtaaacgcaatccgggccgcgccgcgcctaacctgcccaacgcaccgttaacaatttgtgggttacattgcagatcaaacaggcggctcattttcgccagacactctgcggcaacaggttctaaacctgcacttaaatttatgtgcagagtatggcgggctatatccggaatagcagtcaccacgccgcgatattcgcccaccgccagactacgggcataataactgtccgcgaccgtttccacactgctcaccgcacgggcggcgagaaatcccaacatccagctccagtcatacggcggctgccagttcagggtatacatcgcatctccttattcatccgctttcagcataaacgttattcagacgctgcgctttgctttcatattccggttgtcgcgacggcaacatttcgctaaagtcacgccccttcttcaccggcatggggattatttcgtgtttattggttttgattacggtacagcaaactgtagtgtggcggtcatgcgtgacggtaaaccgcatttgctaaaaatggaaaacgacagcacgctgctgcctagtatgctttgcgcgccaacgcgtgaagcggtaagcgaatggctgtaccgccatcatgatgttccggcagacgacgatgaaacgcaggcgctgttacgtcgggcgattcgttataaccgcgaagaagatatcgatgttacggcgaaaagcgtgcagttcggtctttccagtctggcacagtacattgatgatccagaagaagtgtggtttgtgaaaagtccaaaaagcttcctcggtgccagcggcttaaaaccgcagcaggtagcgctgtttgaggatctggtctgcgcaatgatgttgcacattcgccagcaggcgcaggcacagctgccagaagcgattactcaggcggtgattggtcgtccgatcaacttccaggggctgggcggtgatgaagcaaacacccaggcgcaagggattctggaacgcgcggcgaagcgtgccggattcagggacgtggtattccagtacgagccggtcgcggctgggctggattacgaagccaccttgcaggaagaaaaacgggtgctggtggtggatatcggcggtggtacgactgactgtagtttgctgctgatggggccgcagtggcgtagccgtctcgatcgtgaagccagcctgctgggtcacagtggttgccgtattggcggtaacgatctggatatcgcgctggcgtttaaaaacctgatgccactgctgggtatgggtggcgaaaccgaaaaaggcatcgccctgccgatcctgccgtggtggaatgcggttgccatcaacgacgtacctgcgcagagtgatttctacagtagtgccaacggtcgtctgcttaacgatctggtacgcgatgcccgcgaaccggaaaaagtggccctgttacagaaagtctggcgtcagcgtttaagctatcgcctggtgcgtagcgcagaagagtgcaaaattgctcttagtagcgtagcggaaacccgcgccagtctgccgtttatcagcaatgaactggctacgctgattagccagcgagggctggaaagcgccctcagccagccactgacgcggattctggaacaggtgcaactggccctggataacgcccaggaaaaaccggacgttatctacctgaccggcggtagcgcccgttctccgctgattaaaaaagcgctggcagaacagttgccgggcattccgattgcaggcggcgatgactttggctccgtcaccgccgggctggcacgctgggcggaagtggtgtttcgttaattgaaaaatggctcagcagcggcttaaatctgcctgcgcctgagccagtttttctgctgcctgacgtaacggttccatcaacggcatggtccgtgctggagcatgaaggcggaatcgctgcaactctgtcgcgccgactgtcaacgcgctttccagccgatgtcgtttggcggtcattttcgccattaccgcttgtctgtctgctggcgttatcgcttcattcggcctgaacacaaaacggcgttcacagctcgctttccagtcgataaccgcctgggtcagatggtcgccaaaccctttcacttgcttaacgccacgacgggtaacatctgcggctgtttcaataccaaaagaccgtaacgccgctttacgcgcagggccaacgccgggaatagaggcaacatcaataaaaaatccctccagaaacttctgcttctgccgttcccttgcagtgtcatgaagtgctgccagagcgcgtttctcttcttccggtaacccgagaatttcgtccttcattttttcgagcatcgtccgtttggcgataaaaccttccaggccgcctacctgctggatctggcggactaaatggtcatagtccattttcgcacgattaaatgcctcacggcgttgctgaacttctgctttgtacgctttgcttgtcagactgccaataatccagatagccgccagcacaggaaccaaaataatataacgcggttctgcctgaaggccgcaaagcagcaggcttaatgcactcagtgcgatctcaagcagaatgatgtattcgcgccgtaacaggcctaaaggaagcggcctgccagtcggttggaaatgatcgggtaatggcagttgcaatgctggcggtgctacactcgccatcaccatcgcccagactttcgccagcacaaaattcccgccggtggtaatgacctcttcgccgagatcaataaaatagataacaccttgattatccagcgcacaccacgggcagtcagtcaaatgagcggggtaaacatgcattgcactaacgatacatttctttaactgttggcgtagagagtccagtgccgctacccacgctttagccgtcggacgcccggttgccacgccactttccgtgaatgcctgctgaaacatggcttcaacatcactcggtaacatgcttagcggaatagatcgtggcggcggttttaaaccacgtcgctgattatcactcgcgtaggcataacggaaatgggtaatatccgtctccagcgcattacccgcatcagagataagcggcacaccagaataaggatgccgcccaccaaacaagacgtgaaaaattagcaacgcaaggccaaaattatcgtgattttctgtgcgttcaaaaccgacaaaacttggcaaggtttgtagctctggcggcgtaaaatggctcacgccgacttcgcataaatgcagtgtgccattggcgttaatttgaaaggagtcgctatcaatcagtaccactttgctgtcgcgacctaccataaaactgttctggtttacgtcacccacgacgtgcccgtgctcgtgaaccgtagcaaaagaactagcaatattgcgcgcaacatagagtagaaaatcccacgcacaatgagggtaactctggcgacgatgtgccgggctatagatcatatgaatcggttctttaccagaaacttttggcatcataaaaccgataacttttccgcctcgtccaccgtgaagcgttgcctgcggccaggcgacataattcaacaactgcgcgtcagctgtcgcagccataaaggcaagtttgtcctgttttaaggcgggtggcggcgtgtgataaatcttggcgacgctatcgacaaactcctcgatatcataaaccgcgccttcaccacctttgcccagttcacggccaagagtggtcaattcacctgtgcttgtaaatacttttatatttgttttcataatatttcgcgggtagttatattatatttcaatgaataataacaactaaccattaaaattatttctatatggggaaaacccactcaagaataaaaatgataatgcaattttatcaggatacaattcaatttcggcctgataatgattaacttccacaggtttttgctaactttgactacaaagggattctggagaaaaaatgaaaaagatattacttatgttgagtctgctattttttactaccgcgggctttagtgaagttagcgatacgttagtgacgggaggttatgataaacaagcgatgtctgacgcgattaaacatgcgcggaaagaaaccgataaattcatcgaggttatgaataaaaaagatgccgatactttcgcagtcaaagccccgataaccgatcacggaagaaccgagcatttctggcttacggatgtcacttattctaacggcatgtttattggcgtaatcagcaatgaccctggtattgttacaaacgtagaatatggccaggagtggaaaatcaagaaagaagatattagtgactggatgtatacgcgcggggataaaatttacggcggttataccattgatcctttattggtcacctatccaaaagaagaagccgacgagctaagagcaaaattagttcgctaatcagccgttatatttattgtttaaactggcggttgaattgttgtcttcaaccgccatgagaaactcactctgcccacagcgccagtgccaacgttttatcatcatccgtacgctcgtttaccgccgggctggacaaaaactgctttaacaattcaggtaataaatcgagttgttcctgcgttgctgccgccagtccattgaaaaacggggtaaagaaaggcacatgaggagaattatccagcatatttaacgccagtcgctggataccatccgtaaatgctgcaactttgtgcgcacgcccagtgctggtgagagtttccagtctggaaacggcatcttcgtcggtaatgaagtgcgtcatgttggcatattcacccgccatcggcgtgagaggcaattgcagaccgtgacccaaatctaccaccacgccgccatcgccaatctgcataatcaaggtgccgtcagggctactaatcagtcccagaaatgtgcaggcaaaatcgcgaaccgctaattctttggcttccgcctcggcaaaaagtcgttgacgaatggtcagtaccatatttgtggcgaggacatcattaagccccaattccccgccctgcactttttggctcatataagccatcgcttcattgacggcgagcatcgcgccttcgccaccctggctgacactgcctgcgccatcagcgacaaatacgctcaataatggctgctggtcatttaaccaggcaatctgcatctggcaggcatcctgacaaggcaagtccgcgctgatgtggctcgttccaacggtacttgcatagaccagacgccagctcacacactcgtccagccttttggcgcttccagcacaacttccgttcccggcgtggagcgggaaacgctacgcaggctactggataaccagctaaacagttcacggaattgtaatccttgcagaggcaaaggctgacgaacgctaatttgtgccagcgtcttcatatccgccccctgaacaccgatggaaaagaaagcaaaccttttatcttcttccccccgaaacactttgttggctgcagcctgccactcatcggttggtgcaccatcggtaatcaggaaaatccacgggcgataatagctaataccatttgcacgatactcacgtttccgctcctctaccatatccagggctttggtaatggccgcacccattggtgtatcgccctgggcaaacaggatgggcggaaaaaaattagcggcgctggtaaagggttgttccacatgcaccgggccgaacgtcacaatgccgagttccactctttttaaagccagcggatcagcaagcagttcatcacgaaaggtaaccaatccggcgttaagttcattaataggtctaccgttcatagaaccagaaacatccagcagcaaaatgcaggggcaacgtggttccgggttactggcaaaatcgctggtggcaaacgtgatttgttcgctcataagaaatcctttcttagagaattatcgaggtccggtatcataccgactgcaataatgaaataagagcaaacgaagaaactttcagaattaggcccggcggcgcagaaaattttgctattcgcctcgcaagaacggagagccgtcgattgacactaagggcggagtgacataatttcaggagtgagggttagggagaggtttccccctccccctggtgttcttagtaagcctggaagctaatcactaagagtatcaccagtatgatgacgtgcttcatcataaccctttccttattaaaagccctcttctccgggagaggctttcccgtttcagcgtcccgctgaaatcatcggcttacctcctttcgccctgaatgcagtctatcgctaacgcgtgaataaaatagtttcctctgtgattattgcgtaacgactcgcaaagaatatttgctggcaggatcgcagactacaaagcctgcggattgacaatcttatcgtgaagacatactttcaggagtgagggtagagcggggtttcccccgccctggtagtcttagtaagcggggaagcttatgactaagagcaccacgatgatgagtagcttcatcatgaccctttccttatttatggccccttcctcgggaggggctttcccgtttcagcgtcccgctgaaatcgtcggcttacctcctttcgccatgcaagcagtctatcgctaacgcgtagataaaatagtttcctgtgttattactggatgcgtgctcgcaaatgtgcccgtcattcagacgattccagacagtgtttcataattcctccatttttctcccttattggctggctacactagtatcattccgcgaaacgtttcaggaagagaaactcttaacgatgaaaggtagttataaatcccgttgggtaatcgtaatcgtggtggttatcgccgccatcgccgcattctggttctggcaaggccgcaatgactcccggagtgcagccccaggggcgacgaaacaagcgcagcaaagcccagcgggtggtcgacgtggtatgcgttccggcccattagccccggttcaggcggcgaccgccgtagaacaggcagttccgcgttacctcaccgggcttggcaccattaccgccgctaataccgttacggtgcgcagccgcgtggacggccaactgatagcgttacatttccaggaaggccagcaggtcaaagcaggcgatttactggcagaaattgaccccagccagttcaaagttgcattagcacaagcccagggccaactggcaaaagataaagccacgcttgccaacgcccgccgtgacctggcgcgttatcaacaactggcaaaaaccaatctcgtttcccgccaggagctggatgcccaacaggcgctggtcagtgaaaccgaaggcaccattaaggctgatgaagcaagcgttgccagcgcgcagctgcaactcgactggagccggattaccgcaccagtcgatggtcgcgttggtctcaagcaggttgatgttggtaaccaaatctccagtggtgataccaccgggatcgtggtgatcacccagacgcatcctatcgatttagtctttaccctgccggaaagcgatatcgctaccgtagtgcaggcgcagaaagccggaaaaccgctggtggtagaagcctgggatcgcaccaacagcaagaaattaagtgaaggcacgctgttaagtctagataaccaaatcgatgccactaccggtacgattaaagtgaaagcacgctttaataatcaggatgatgcgctgtttcccaatcagtttgttaacgcgcgcatgttagtcgacaccgaacaaaacgccgtagtgatcccaacagccgccctgcaaatgggcaatgaaggccattttgtctgggtgctgaatagcgaaaacaaggtcagcaaacatctggtgacgccgggcattcaggacagtcagaaagtggtgatccgtgcaggtatttctgcgggcgatcgcgtggtgacagacggcattgatcgcctgaccgaaggggcgaaagtggaagtggtggaagcccagagcgccactactccggaagagaaagccaccagccgcgaatacgcgaaaaaaggagcacgctcctgatgcaggtgttacccccgagcagcacaggcggcccgagccgcctgtttattatgcgtcctgtggccaccacgctgctgatggtggcgatcttactcgccgggattatcggttatcgcgccctgcccgttagcgcgctgccggaagtggactatccgaccattcaggtggtcacgctctacccaggtgccagcccggatgtcatgacctctgccgttaccgcgccgctagaacgccagttcgggcagatgtctggcctgaaacagatgagcagccaaagttccggcggtgcgagtgttatcactttgcagttccagctaacattaccgctcgatgtcgccgagcaggaagtgcaggccgcgattaacgctgcgaccaacttgttgccgagcgatctgcctaacccgccggtttacagcaaagtgaacccggcagatccgccgatcatgacgctcgccgtcaccagtaccgccatgccgatgacgcaagtggaagatatggtggaaacccgcgtcgcgcagaaaatcagccagatttccggcgtcggcctggtgacgctttccggcggtcagcgtccggctgttcgcgtcaaacttaacgctcaggcgattgccgccctcggcctgaccagcgaaaccgtgcgcaccgccattaccggcgctaacgttaacagcgcaaaaggtagcctcgacggcccttcccgtgcggtcacgctttccgcgaacgaccagatgcaatccgccgaagagtatcgccagctaatcatcgcctaccagaacggcgcgccaattcgtctgggcgatgtcgcaactgtagagcaaggtgcagaaaacagctggctcggcgcgtgggcgaacaaagaacaggccattgtgatgaatgttcagcgccagcccggtgctaacattatctccaccgccgacagcattcggcagatgctgccacagctcactgagagtctgccgaaaagcgtgaaggtgacagtgctttccgatcgcaccaccaatatccgcgcatccgtcgatgatactcagtttgaattgatgatggctatcgcgctggtagtcatgattatctacctgtttttgcgcaatattccggcgaccatcattcccggtgttgctgtaccgctgagcttaatcggcactttcgcggttatggtgtttctcgattttagtatcaataacctgacactgatggcgttaactatcgccaccggattcgtggtcgatgacgccatcgtggtgatcgaaaacatttcccgctatatcgaaaaaggcgaaaaaccgttggcggcggcgctcaagggcgcaggtgaaatcggctttaccattatcagcctgaccttcagtctgattgcggtgttgatcccactgctgtttatgggcgatatcgtcgggcgactgttccgcgaatttgctattaccctggcggtagcgattttgatcagtgcggtggtgagcctgaccctgacaccgatgatgtgcgcgcggatgctcagccaggagagcttgcgtaaacagaaccgcttctcccgtgccagcgaaaaaatgttcgacaggataatcgccgcctatggtcgtggactggcgaaagtgctgaatcatccgtggctgaccttaagcgtggcactcagcacgctgctgcttagcgtgctgctgtgggtgttcattccgaaaggtttcttcccggtacaggacaatggcattattcagggcactttgcaggcaccgcaatccagctcctttgccaatatggcccagcgacaacgccaggtcgcggacgtgattttgcaggatccggcagtgcaaagcctgaccagttttgttggcgttgatggcactaacccgagcctgaacagtgcacgtttacaaatcaacctcaaaccgttggatgaacgtgatgatcgggtgcaaaaagtcatcgcccgtctgcaaacggcggtagataaagtgccgggcgtcgatctcttcctgcaaccaacgcaggatctgactattgatactcaggtcagccgcacccagtaccagtttaccttgcaggccacgagtctggatgcgctcagtacctgggtgccacagttgatggaaaaactccagcaactgccacagctttctgatgtctccagcgactggcaggacaaagggctggtggcgtatgtcaatgttgatcgcgacagcgccagccgtctggggatcagcatggcggatgtcgataacgccctgtacaacgcgtttggtcagcggctgatttccactatttatactcaggccaaccagtatcgcgtggtgctggagcacaacaccgaaaataccccaggcctcgcggcgctggataccattcgcctgaccagcagcgacggcggcgtggtgccgctaagcagtattgccaaaattgagcagcgttttgcgccgctctccatcaaccatctggatcagttcccggtaacgaccatctcctttaacgtgccggataactatagcctgggcgatgcggtgcaggcgattatggacaccgaaaagacgctgaatctgccggtggatatcaccacgcagttccagggcagcaccctcgccttccagagcgcgctgggcagcactgtctggctgattgtcgcggcggtggtggcgatgtatatcgtgctcggcattctgtacgagagctttattcacccgatcaccattctcagcacgctacccaccgcaggggttggcgcactgctggcgttgctgattgctggtagcgaactggatgtgattgcgattatcggcattattttgctgatcggtatcgtgaagaagaacgccatcatgatgatcgacttcgcgctggctgctgagcgcgagcaaggcatgagcccgcgcgaggcaatctaccaggcttgtctgttgcgttttcgtccgatcctgatgaccactctggcggctctgcttggcgcgctgccgctgatgttgagtaccggggtcggcgcggaactgcgtcgtccgttaggtatcggcatggtcggcggtctgattgtcagccaggtgctgacgctgtttaccacgccggtgatttatttgctgttcgaccgcctggcattgtggaccaaaagccgctttgcccgtcatgaagaggaggcgtaagtgaagttttttgccctcttcatttaccgcccggtggcgacgattttactgagcgttgccattaccctgtgcggcatactgggcttccgtatgctgccggtcgccccgctgccgcaggtcgattttccggtgattatcgtcagcgccagcctgcccggtgcgagtccagaaacaatggcgtcttccgttgccacgccgctggagcgcagtcttgggcgcattgccggagtcagtgaaatgacctccagcagtagcctcggcagcacgcgtattattttgcagtttgattttgaccgggatatcaacggcgcagcgcgtgatgtgcaggcggcgatcaacgctgcacaaagtttgctgcccagtgggatgcccagccgcccgacctatcgcaaagcgaacccgagcgatgcgccaattatgatcctcacgctgacgtccgatacttatagccagggtgaactgtacgatttcgccagcacgcagctggctccgacgattagccaaatcgacggtgttggtgatgtcgatgtcggaggcagcagtctgcccgccgtacgcgtcgggctgaatccgcaggcgctgtttaatcagggcgtgagcctggacgacgtacgcaccgccgtcagcaatgccaacgtgcgtaaaccgcagggcgcgctggaagatggcactcaccgctggcagatccagaccaatgatgagctaaaaaccgccgctgaatatcagccgttgattattcactacaacaacggcggcgcggttcgtctgggcgatgtggcgacggtgaccgacagtgtgcaggatgtgcgcaacgccgggatgaccaacgccaaaccggctattttactgatgatccgcaaactgccggaagccaatattatccagacggttgacagcatccgggcaaaattaccggagttgcaggaaaccattccggcggcgattgatctgcaaattgcccaggatcgctcccccaccattcgcgccagcctggaagaagtcgagcaaacgctgattatcagcgtggcgctggtgattctggtggtgtttttattcctgcgcagcggtcgcgccactattattcccgccgttagcgtgccggttagcctgattggtacgtttgcggcgatgtacctgtgcggattcagtctcaataaccttagcttaatggcgctcaccatcgctactggtttcgtggtggatgacgccatcgtggtgctggaaaacattgcacgtcatctggaagcgggaatgaaaccgttgcaagccgcactgcaaggtactcgcgaagtcggttttacggtgctgagcatgagtctgagtctggtggcggtgttcctgccgctgctgttgatgggcggattgccgggccgactgttacgcgaatttgccgtgacgctttctgtcgccattggtataagcttgctggtttctctgacattaacgccaatgatgtgtggctggatgctgaaagccagcaagccgcgcgagcaaaagcgactgcgtggttttggtcgcatgttggtagccctgcaacaaggctacggcaagagtctaaaatgggtgctcaatcatacccgtctggtgggcgtggtgctgcttggcaccattgcgctgaatatctggctgtatatcagcatcccgaaaaccttcttcccggagcaggacactggcgtgttgatgggcgggattcaggcggatcagagtattagctttcaggcgatgcgcggtaagttgcaggatttcatgaaaattatccgtgacgatccggcagtggataatgtcaccggctttacaggcggtagccgagtgaacagcgggatgatgtttatcaccctcaagccacgcgacgaacgcagcgaaacggcgcagcaaattatcgaccgtctgcgcgtaaaactggcgaaagaaccgggggcgaatctgttcctgatggcggtacaggatattcgcgttggtgggcgtcagagcaacgccagctaccagtacacgttgttatccgacgacctggcggcactgcgagaatgggagccgaaaatccgcaaaaaactggcgacgttgccggaactggcggacgtgaactccgatcagcaggataacggcgcggagatgaatctggtttacgaccgcgacaccatggcacggctgggaatcgacgtacaagccgccaacagtctgttaaataacgccttcggtcagcggcaaatcagcaccatttaccagccgatgaaccagtataaagtggtgatggaagtggatccgcgctatacccaggacatcagtgcgctggaaaaaatgttcgttatcaataacgaaggcaaagcgatcccgctgagctatttcgctaaatggcaaccggcgaatgccccactaagcgtgaatcatcagggattaagcgcggccagcaccattagctttaacctgccgaccggaaaaagcctcagcgacgccagtgcggcgatcgatcgcgcaatgacccagcttggtgtgcctagcacggtgcgcggcagttttgccggcacggcgcaggtgttccaggagacgatgaacagccaggtgatcctgattatcgccgccatcgccacggtgtatatcgtgctgggtatcctttacgagagttacgtacatccgctgacgattctctccaccctgcccagcgcgggcgttggagcgctgttggcgctggagctgttcaatgccccgttcagcctaatcgccctgatagggatcatgctattaatcggcatcgtgaagaaaaacgccattatgatggtcgattttgcgcttgaagcccaacggcacggtaacctgacgccgcaggaagctattttccaggcctgtctgctgcgttttcgcccgattatgatgactaccctggcggcgctgtttggtgcgctgccgctggtattgagcggcggcgacggcagcgagctgcggcaacccctggggatcaccattgtcggcggactggtaatgagccagctccttacgctgtataccacgccggtggtgtatctctttttcgaccgtctgcggctgcgttttagccgtaaacctaaacaaacggtaaccgagtaaatgacagatcttcccgacagcacccgttggcaattgtggattgtggctttcggcttctttatgcagagcctggacaccaccatcgtaaacaccgcccttcccagtatggcgcaaagcctcggggaaagtccgttgcatatgcacatggtcattgtctcttatgtgctgaccgtggcggtgatgctgcccgccagcggctggctggcggacaaagtcggcgtgcgcaatattttctttaccgccatcgtgctgtttactctcggtagtctgttttgcgcgctttccggcacgctgaacgaactgttgctggcacgcgcgttacagggcgttggcggcgcgatgatggtgccggtcggcagattgacggtgatgaaaatcgtaccgcgcgagcaatatatggcggcgatgacctttgtcacgttacccggtcaggtcggtccgctgctcggtccggcgctcggcggtctgctggtggagtacgcaagctggcactggatctttttgatcaacattccggtggggattatcggtgcgatcgccacattgctgttaatgccgaactacaccatgcagacgcggcgctttgatctctccggatttttattgctggcggttggcatggcggtattaaccctggcgctggacggcagtaaaggtacaggtttaagcccgctgacgattgcaggcctggtcgcagttggcgtggtggcactggtgctttatctgctgcacgccagaaataacaaccgtgccctgttcagtctgaaactgttccgtactcgtacctttagcctgggcctggcggggagctttgccggacgtattggcagtggcatgttgccctttatgacaccggttttcctgcaaattggcctcggtttcagcccgtttcatgccggactgatgatgatcccgatggtgcttggcagcatgggaatgaagcgaattgtggtacaggtggtgaatcgctttggttatcgtcgggtactggtagcgaccacgctgggtctgagcctggtcaccctgttgtttatgactaccgccctgctgggctggtactacgttttgccgttcgtcctgtttttacaagggatggtcaacagcacgcgtttctcctccatgaacaccctgacgctgaaagatctcccggacaatctggcgagcagcggcaacagcctgctgagcatgattatgcaattgagcatgagtatcggcgtcactatcgccgggctgttgctgggactttttggtagtcagcatgtcagcgtcgacagcggcaccacacaaaccgtctttatgtacacctggcttagcatggcgttgatcatcgcccttccggcgttcatctttgccagagtgccgaacgatacgcatcaaaatgtagctattagccggcgaaaaaggagcgcgcaatgaagttctggcgacccggtattaccggcaaactgtttctggcgattttcgccacctgcattgtcttgctgatcagtatgcactgggcggtgcgtatcagttttgagcgtggctttattgattacatcaagcatggtaatgaacagcgattacaactgttaagtgatgcgcttggcgagcagtatgcgcagcatggcaactggcgcttcctgcgcaacaatgatcgctttgtctttcagatcctgcgtagttttgaacacgataatagcgaagataaacccggcccgggtatgccaccgcacggctggcgtacccagttctgggtggttgatcaaaacaacaaagtgctggttggtccgcgagcgccgattccacctgacggtacacggcgacccattctggtcaacggtgcggaagttggcgcggtgatcgcctcccccgttgagcggttaacgcgcaatactgatatcaatttcgataaacaacagcggcaaaccagctggttgattgtcgccctggcaacgttactcgcggcacttgccacttttctgctggcgcgcggtttactggcaccggtaaaacgacttgtcgatggcacgcacaaactggcggcgggcgatttcactacccgcgtaacgcccaccagtgaagatgaactgggcaaactggcgcaagacttcaaccagcttgccagcacactggagaaaaaccagcaaatgcggcgcgattttatggccgatatttctcacgaactgcgtacgccattagcggtgctgcgcggtgaactggaagccattcaggatggcgtgcgtaaattcacgccggagacggtggcgtctttacaggcggaggtcggtacactgaccaaactggttgacgatctccatcagttgagcatgtctgatgaaggcgctctcgcctatcaaaaagcaccggtagatttgatcccactgctggaagtggcgggcggcgcatttcgcgaacgattcgccagtcgtggcctgaaactgcaattttccctgccagacagtattaccgtatttggcgatcgcgaccgtttaatgcagttattcaataacttactggaaaacagcctgcgctacactgacagcggcggcagcctgcaaatctctgccgggcagcgcgacaaaacggtgcgcctgacctttgccgacagtgcgccaggtgtcagtgacgatcagctacaaaaattgtttgaacgtttttatcgcaccgaaggttcccgcaaccgtgccagcggcggttccgggctggggctggcgatttgcctgaacattgttgaagcacataatggtcgcattattgctgcccatagcccttttggcggggtaagcattacagtagagttaccgctggaacgggatttacagagagaagtatgaccgagttaccaatcgacgaaaacacaccgcgtattttgatcgtggaagatgaaccgaagctggggcagttgctcattgattatctgcgtgctgcgagctatgcgccgacgcttatcagccacggcgatcaggtactgccgtatgtgcgccagacaccaccggatctgatcctgttagatctgatgctccctggcaccgatggcctgacgctgtgccgggaaattcgtcgtttttctgacattccgatcgtgatggtgacggcaaaaatcgaagagatcgatcgcctgctggggctggagattggcgcagatgattatatctgtaagccgtacagcccacgggaagtggtagcgcgcgtcaaaaccattttgcgccgttgcaaaccgcagcgcgagttgcagcaacaggatgctgaaagcccgttgattatcgacgaaggtcgttttcaggctagttggcgcggtaaaatgcttgacctgacgcctgcggaatttcgtctgctgaaaacgctctctcacgaaccaggaaaagtgttctcccgcgagcaattgctcaatcatctttatgacgactaccgcgtagtaaccgaccgcaccatcgacagccacattaaaaacctgcgccgcaagctggaatctctcgacgccgaacagagttttatccgcgccgtttatggcgtcggttaccgctgggaagccgacgcctgccgcatcgtttaattttagcgacattattttgttagccggagatggcgttcagaccagatccggcaacattatcccacgcatggtcagcaaactgacattatctctccgccctggcaggcatcagaaaatcgctcatactttaatcggtaaacagcacctttagaatcctgtcgtttgttttcgatttcaaaatataatgaaattatttgtttttaaatatcgagataacgatcacaaaaacgacaatatgaaaattattcgaggagtgaaaggcaaaaaaacggcctcccgatagggaagccgtagcaaagtgcgcgtgtttttatgccggatgcggtgtaaacatacgtggcagtgctatgtaggcatgataagacgcttcagcgtcgcatcaggcataggttgccggatgcagcgtaaacgccttatccgtcctacggggtggtgttgttcgtataaggcgtatcaggcgatagtaattttgctatcgagataaacgtcctgcacggcgttaatcagtttcacgccgtcagccatgcttttcttgaacgctttacgtccaagaatcagccccattccgcctgcgcgtttgttgataaccgcagtacgcactgcatcgctgaggtcagtttcaccgcccgcagcaccgccggagtttatcaacccagcccgacccatatagcagttagctaactgataacgcaccagatcaatcgggttttcgctggtcaatttgctgtaaacacgatcgtcggtgtaaccgtaattaattgctttatagccgccgttattttccgccattttttgtttgacgatatctgcaccgatggttgccgccagatggtttgcctgaccggtcaggtcggcggaaacatggtaatcaacgccatctttcttaaaggcggagttacgcaaataggcccacagcactgtcaccatacccagctcgtgcgcacgttcaaaagccgcagaaatttcttcaatctggcgacgactctcttcgctgccaaaatagatagtcgcaccaaccgcaaccgcgcccatgttgaacgcctgctccacgctggcatacagcgtttgatcgtaggtattcgggtaacttagcgtctcgttgtgattaagtttgacgaggaatggaatgcgatgcgcataacgccggcttacgctcgccagcacgccgtaagtactcgccacacagttacagcccgcttcgatcgccagttcaacaatgtttttcgggtcaaagtagagcgggttagcagcaaaactagctccggcagagtgctcaacgccctggtcaaccggcagaatagaaagatatcctgtgccagccagacgcccggtgttgtacaacgtctgcatattacgtaacaccgctggcgggcgattattgtcaatcattacgcggtctacgtagtcatgtccggggagataaagctggtcagaaggaattgtcatacaacggtgctgtaaaaggttgtcggcgtctttgccaagcaactgcgcaatatctgtcattactatgctcccgtaaattccgattggatatcggctatggattgtcctggcccgccttttgcgggcaatcataatcctggtcgttacgggcgagtttttccatcttttggatgttttttcagcgttttctgttggctcgattcatcagaaaaaatgttagcgcggtcaagttttcaccgcaaaggtatttaaaaggtattattaagtggtattgtcatcgcgtaccttacattacctgtcatgaaggaattaaaagatgaaaacaacagcaaagctgagcttcatgatgtttgttgaatggtttatctggggcgcgtggtttgtgccattgtggttgtggttaagtaaaagcggttttagtgccggagaaattggctggagctatgcctgtaccgccattgcggcgatcctgagcccaattctggttggctccatcactgaccgctttttcagcgcgcaaaaagtgctggcggtattgatgttcgcaggcgcgctgctgatgtatttcgctgcgcaacagaccacttttgccgggttcttcccgttactgctggcctacagcctaacctatatgccgaccattgcgctgactaacagcatcgcttttgccaacgtgccggatgttgagcgtgatttcccgcgcattcgtgtgatgggcactatcggctggattgcctccggtctggcatgtggtttcttgccgcaaatactggggtatgccgatatcagtccgactaacatcccgctgctgattaccgccggaagttctgctctgctcggtgtgtttgcgtttttcctgcccgacacgccaccaaaaagcaccggcaaaatggatattaaagtcatgctcggcctggatgcgctgatcctgctgcgcgataaaaacttcctcgtctttttcttctgtagtttcctgtttgcgatgccactagcgttctattacatctttgccaacggttatctgaccgaagttggcatgaaaaacgccaccggctggatgacgctcggccagttctctgaaatcttctttatgctggcattgccgtttttcactaaacgctttggtatcaaaaaggtattattgcttggtctggtcaccgctgcgatccgctatggcttctttatttacggtagtgcggatgaatatttcacctacgcgttactgttcctcggtattttgcttcacggcgtaagttacgatttttactacgttaccgcttacatctatgtcgataaaaaagcccccgtgcatatgcgtaccgctgcgcaggggctgatcacgctctgctgccagggcttcggcagtttgctcggctatcgtcttggcggtgtgatgatggaaaagatgttcgcttatcaggaaccggtaaacggactgactttcaactggtccgggatgtggactttcggcgcggtgatgattgccattatcgccgtgctgttcatgatttttttccgcgaatccgacaacgaaattacggctatcaaggtcgatgatcgcgatattgcgttgacacaaggggaagttaaatgaaaacagaacgtattctcggtgctctttatgggcaggcgttaggggatgcgatggggatgccctccgagctttggccacgcagccgcgttaaagcacactttggctggattgaccgttttcttcctggaccaaaggagaataacgcggcctgttattttaaccgcgccgaattcaccgacgataccagcatggcgctgtgtctggcggatgcgttactggaacgtgaaggcaagatcgatccggatctgattgggcgtaatattctcgactgggcgctgcgtttcgacgcctttaacaaaaacgtactaggtccgaccagcaagattgcgcttaacgccattcgcgacggtaaacccgttgctgaactggaaaacaacggcgtgaccaacggcgcagcgatgcgcgtcagcccattaggttgtttgcttccggcgcgtgatgttgattcctttattgatgatgtagcgctggcgtccagcccgacccataaatccgatctggcggttgcaggcgcggtagtcatcgcatgggcgatttctcgtgccattgacggagaaagctggagtgcgattgttgattccctgcctagtattgcgcgacatgcacagcaaaaacgcatcactacgttcagcgccagtctggcggcgcggctggagattgcgctgaaaattgtgcgcaatgccgacggcaccgaatccgccagcgaacagctttaccaggtcgttggcgcaggtaccagcactattgagtccgttccgtgcgccattgcgctggttgaactggcacaaaccgacccgaatcgctgcgccgtcctgtgcgctaaccttggcggcgacacagacaccatcggtgctatggcgacggcaatttgcggcgcgttgcatggcgttaacgctatcgatcctgcgttaaaggcggaactggatgcggtaaatcagcttgatttcaaccgctatgccacagcgctggcgaaatatcgtcaacaacgggaggcggtatgagcggcgctcgattacacacgctgctgcctgaattaaccacgcgtcagagcgtgatggtcgtcggcgcggcggtcattgacgtgatcgccgacgcttatgccctcccctggcgtgggtgcgatatcgaactgaaacagcagagcgttaacgttggcggctgcgcactgaatattgccgtggcgttaaagcgcctcggcatcgaagcgggtaatgccttgccgctcggtcagggcgtgtgggcggagatgattcgcaaccggatggcaaaagagggcttaatcagcctgatcgataacgccgaaggtgataacggctggtgtctggcgctggttgagccggatggcgaacgcacttttatgagtttcagcggtgttgaaaatcagtggaatcgccagtggctggcgcgattaaccgttgcgcctggcagcctgctctatttttccggttatcaactggccagcccctgcggcgaattgttagtggaatggctggaagagctgcaagacgtgacgccgtttatcgattttggcccacgtattggcgatatcccggatgcattactggcgcggatcatggcctgtcgacctttagtgagcctcaatcgtcaagaggctgagattgccgccgaacgttttgctttatccgcagagataacaacacttggcaagcaatggcaggagaaatttgccgcgccgttgatcgttcgtctcgataaagaaggcgcatggtatttcagcaacgacgcttctggctgcattccggcatttccaacgcaagttgtcgacaccattggggcgggcgacagtcatgccggtggcgtacttgccgggctggcctctggtctgccactggcggatgccgtattactgggcaatgcagtggcgagctgggttgtcgggcatcggggcggtgattgtgcgccaacgcgcgaggaactactcctcgcacacaaaaacgtataattactcctcgcacacaaaaacgtatagatcgctgcgacagtggctaatgctgtactcaataggccgttgctgttggtcaagcgccacttgcttgatcaccagcaccggtattttgctatctaactgaatatgactctgaaactcggcatccggcatccgggcgctaacgcgggaacgcgtacgttgtgggtaaatgtgctggctgcggaaatagtcataaagactaatcccgatggcatcaacatcatgaattaaatgcgccggaacccagctttcctcaatgcttaccgcttcttcatcgacatagcgaatacgcttaagcaaaaagacatcacttcctgcttcgaccgccagctgctgcgcgacttcttcgggacatttcacgacacgcttgttaacccatagcgtatcgggctttttcccgcgcaataccacctgctgagaaaaacctcgcgcttctttcaagctgtattcgaagatgttgttgatctgcgtgccgtaaccgcggctacgcgtcaccacaccctcttcttccagcgcctgcatcgccttgcgcaccgtaatgcggctaacgccggttaactgacttaaatcacgttcaccgggcaaaatattgccatgctccagcaccccgctgcgcacggcattttttaccgtttcggcaaacttaatataaagcggcgtgttatccgccgctaaaatacgctcgttcagttgggcaatcagctgggtatgcgcttgttccatttgtctttttcctgccggggagtctggtgggagtatatcactgcttcttatttaaggcgtttctttaatcccatcaacgaatgcctgcaactcctccaccgtgccattaaatacattaaaatccaccggaccattgatgccatctacctgtccacggtcggaatgctgccagaagcgccaggccattccgtcattgtccggacgacgttgatagtagtgagccacccaccacggatattcattgaaatagcccgccagattggtgtgataaaaaacggctccactgtaaataatcggctttttccccgtacttttttcgaccatttttagccactgacttacccgcttgcgtaattcttttgcgcttaattttccccgttcttctacgtccagcacggcagggaaatcgccttgactgaaatccaccgtttgcagaaataatctcgcctgaacactagcggatacgctcggggagaaataatgatacgccccacgcagcaggccattttcgcggcttagttgccagttacggctaaaataggggtccaccagcttttcgccttccgtcgccttaataaaagcaaactgtaagcggataccattgtcgcgcatttttgccacccgctgccagtcgatccgctcctgccagcggctaacatctattccgtgaatggtgtaactggcaggaatgcgaatagcgaaagatttaaccgggcgataaccgtagaagtggatgtagtctgtaatctgaactgctgtgctatagaaaaaattcaccgtctgacgcggataaattgcaacgatggaaattagcccaagagcgcataatagagaggtgagtttttttcgactggtaattcttagctgcattggtttcatccctgaatgtcagtgccaaaggctgacaataaccaaagcagctatagtacggcgctcaccaccaggcgtggaagtggtgaaccggaccaataccgtgaccaacttccagcgtgtcggcctgggctaacgcgctactaagccagctttttgcctcctgtacggtgtcagcccagtttgtatggcgcgggcgtagtgcagccaacgccgcagagagtgtacaaccagtgccgtgggtgtttttggtcataatgcgcggtgcggtaaaccgttgttcaccctcgcgggtaaacagccagtccgggctttgctcatcatccagatgaccacctttcattagcactgcgccacagcccatcgccaacaggcttcgcccttgttccagcatttcctgttcggtgcgcgcgtgtggcgcgtcgagcaaggcggcagcttcgggcaagtttggcgttattaaactaacctgtggcaataatcgactgcgcagcgtagcaaccgcgctaggactaagcagcgggtcgccgctttttgccagcataacggtgtcgagtaccacgttttggatctgataacgttgcaaccgttctgccaccgcttcaacaatatcggtttccgccagcataccgattttagtggtatcgattcgcacatcgctgaacacgctatcgagctgggcggcgacaaaatcaggctcaatgcgatacacgctctgtacgccacgggtattttgcgccaccagtgcagtaataacactgcaaccataagcgccaagtgcgctgaaggttttaagatcggcctgaatccccgcaccaccactcggatcagtaccggcaatcgtcagagcgttaattcgtttcatgcctgcacctcctgcgtcaattgccagagcgcatcaaggaaatgtggaacaaaactgcctggcccctcgcttctggcgactgcgcgttctccggcttgtttcatccagtgacaggcagatgcgacattttccagcgtatcgcctggtaacgcacagcaggcagcgacaaccgcgcttaatgcacagccagttcctaccactttggtcattaacggatcaccaccgtgaataccaatgatacgatgtccatcggtaacataatccatctcgccagtgaccacgacgattgcgccagtttcccgtgccagtgtttgtgcagcgggtatcgcgttagctgcggcgtcagtggtatccactccccgtccgccattagcaatgccagctaatgccatgatttcgctagcattaccacgtatcgctgccggtttaaaagataaaagttcatgacaaaaatggcggcgataatcgagcgcacccaccgctactggatcaagcgtccagggtgtttgagagctttttgcttgctcaacggcagcacgcatcgcctgagcgcgtggctgcgtcagtgtgccaacgttaatcaacaaggcactggcgatagccgcaaactgactggcctcttcggtttcgataaccatcgctgggcttgcaccgagcgccagcaaggtattggcggtaaaggtttgcaccacatcattggtcatgcagtgcacaagaggggaatgttggtgaaaaaggtgtaacgcgtgcgcagattgcgcactacccagcaggtcgacttgcatagtttgctcctgccataacgtgaagaagcaatgacctggtggtccgtgacttccctacgctggcattatccagatcaggtgatacgggtatttctcagccttcacgcagaagggcaccccgagtcgtttggttgcgatgataaatcgcagaggaggatggtaatgtccagcgcacgcgttgtaaacgaggaaaaacggcagttttacaatcgcgttaataaattatttgatataactatccagcaccttcagaacgacatccagatcttcttcacgttttagctcatccccctggtgaacgatgtgttccgtcagatgacctttaatcacttcccgcatcagaccgtttaccgcgccacggatagcagcaatctgttgtaaaactgcagcgcattcgtgcggctcgtcgagcattttcttgagcgccacgacctggccctgaatcttactggcacgcgctttcagtttctgtttatcacggattgtatgagacatggcaacacctggttaacaagaatatgaaaaatcatagcactattaatctactggggggtagtatcaggtactgggggggagtagaatcagattgccgaattaatactaagaattattatcatgaccgaatttacaactcttcttcagcaaggaaacgcctggttcttcatccccagcgccatcttacttggtgcgcttcatggcctggaaccagggcacagtaaaacgatgatggcggcgtttatcatcgccatcaaaggcaccattaaacaagcggtgatgctcggactggcagcaactattagccataccgcagtggtctggttaattgcctttggcgggatggtgatcagcaagcgctttactgctcaaagtgcagaaccgtggctccagctgatttccgcagtgatcattattagcaccgcgttctggatgttctggcgtacctggcgcggcgaacgcaactggctggagaatatgcacgggcatgattatgagcatcatcatcacgatcacgaacatcaccacgaccatggacatcatcaccatcacgaacatggcgagtatcaggatgcccatgcacgagcccatgccaatgacattaaacgacgctttgatggtagagaggtcaccaactggcaaattttgttatttggcttaaccggtggccttatcccctgcccggcagcaattaccgtgctgttgatatgcattcagttgaaagccctgacactgggcgcaacactggtcgtcagtttcagcattggcctggcgttaacgcttgtcaccgtaggcgttggcgcagcaatcagcgttcagcaggtcgcaaaacgctggagcggatttaacactctcgctaaacgcgccccctatttttccagtctgttgattggcttagtcggtgtgtatatgggcgtacatggcttcatgggcataatgcgataactcaatcctttaggcttgcatgttatcttcagcccaggatgattcttaaatcagctatttccgctgactctctgctcgctaaggatgcttttagggcatcctttcatttacactttttacgaaatcatgggatcactaacaaaatatcgcttgtcagttatattgtatggcaggaaagatatgcgactgatattacagatccccaaagtggagagtttatgaccattaaaaataagatgttgctgggtgcgcttttgctggttaccagtgccgcctgggccgcaccagccaccgcgggtagcaccaataccagcggaatttctaagtatgagttaagtagtttcattgctgactttaagcatttcaaaccaggggacaccgtaccagaaatgtaccgtaccgatgagtacaacattaagcagtggcagttgcgtaacctgcccgcgcctgatgccgggacgcactggacctatatgggtggcgcgtacgtgttgatcagcgacaccgacggtaaaatcattaaagcctacgacggtgagattttttatcatcgctaaaaaaagccccctcatcatgagggggaaatgcagacaccttgttattttttattattagccacttgctcgtcttgcttgttattagtcgtatttcacgttgattaatgcggttgcctccagtgcgccagatttaactttgtttgtatcgtagacgtagtaactggctgttatcggaatactaaccgttgtatctgtaagtttactcttcgccgcaacttcctttaaatttgtatatcctttactgctgttagtgatatttaaaagtgtgactgggctaccattactttcaagaataaatcctacgccattatcttccgcacctttcagtattgtgttgctgttggttaacaagtcagaactacttaaatacacctgcattttccgacttgtttgattttgttgacctaataaatttttacaacgcagaataatatccccttgtttactatttattgttgctttgttacctgtggctggtaattgactaacgggaatactgtctaaagtaattaataaatcgtccggtttgcaggttgtggttatcgggttgtaactcaatgtcagattaaaggaatagacacctgcattttgtgccaatgcatttctgtagctatttacacatgcatcccaactcttgccacctaataaacacagtagaaattgtactgcggcactcccgcgtgtgctactactagcactggataatgtcgcaacaccattaatcatcacactaccgccgccccccgcagaaacattcacttttgcattactggccgcaggtgtcaccgtaacactataaccactggtgaaactggtctgattattactcaacgtgatgttgtttttattggtccattcaaaatgtaaatttaattttatggtatcgttataaagtccaacaataatatcgctcgggctcataggggtgatagtatttgtacttacgcaactgctatcattaaaattatgctcatatgtcgccatttgtgtttgagtaagtgcaaaatccccctgaacaaccaagttgtgctgaacagataactcactataacatgccgcatagctcacaggcataaccatcatcattaatataaatagcattatgcgaatttccatagaaccacctgactattactggcaaatataatttctactttcatcaatctctttaccgaaggtgattgtgcaactaagtccttgttgcttatcaattgccacattaacgcttggcggtacttcattggtgcgaataaataactgacttccctggccgacaacgccaatattatgaccatggatatcattgacttcataaccaaacgttaaactttgcccatctgctcttaacgcttttataaaccatggcttgcgctgatcggtatcaaaattaaccagtacaaccgcgccgcgataaggggcggcaattttccggttgccacgtaattctgcttcgctatcgctttggctcacatccagcatcaggtgattttcccgataaggtgtcattccgtcgtatatcaccactccattacggtttgttgtgcgatatttttgcccattgacataagcatctttaattcctggcgcattcatcacagcaaacgtttcggaaagacggttcgccagattaacgccaccgctccaggcgacaatgcccccactaacactggctccagcctgtcgataagtactgctctgactataactgccattcactgtcgcaaccggcgcgttccaggtcaaattcgccccagctgtcgtttcatttccctgatgttgatgactcaggttgacaccataattgaactgatcccgactccctactgttccacttaatcccgtattattactggcaaacccctgatcatcaaacgtcgtactgttagacatatatatttgccgacgaggcgtgctaacgtcatcaccccaatcaaagggaatgcttataaaaatattaaaacgtttctcttcatgatgattctcgtcataagcctggcttgccgcgagggtatagcttatccgtcgcaggttgttggaataactcaactgataatccttactactgccgctacgcccccagtaatctcgccataacgtacttaaactcacagacccccaaccttctggcaaactctggctcatattggcggaaaagctatttttgcggccaaaatcgttctggtaataatcggcaatgtcatagacatcgttttcatcacggcgataattatctttattgtttgcccaaacgtgatcgttaaatgtccggtaatcacggctgctataacgccaggccgccagaccaaaacgcgtgctcgtttggctcacaaacttgttgtaggcaatttgataactttgcccgtcaaacacatcgccgttgtcttgtttactatggctcttagtggcatcgacggaaatggcaccaatgcgtgtattccagccagcccccaaagtaaacgcgtaataattattcgcgaccatgctgccaccatacagcgtcaataaattattaaaaccatactgataacccgcctggacaaaatcactttgtttgctcgccccttcaatatggctacgacccgccgctaaatcatatttgctcacgccgggttgcagcatatttggcaccgctgcataaggcaccagataggtggttacgctgccgtccgcctctttcacgctgacatcaagatctgctccaccaccggccaactgcaaatctgtaatcgcgaacgggccaggaggaacctctttctgataaaccacaaaaccattctgttcaatagttaccagcgcgttactctgagcaatcccctgcacccgtggcgtaaaattttgtttgctgttaggcaacatctgcatatcacgaaacaaccgcacacctctgaagcgaacagaatcaaaaatatcgctacttgtgtacatatcacccacgcgaagcgtgccgagaagttgggcaaatccacgttccagatacagggtattgcttttccacacccctggattgttatttgttttactgaaactggcatcagaatgcagttgccaccccagtaaatttaacccgctgttaaaacgtacatatgtactcttgttattaccgctcgctttatagtcgctgtaatactgactcagataataagaggtataaaacgcattaataccccgctcccagttttccggtggaacatagccactttccagttcttccacccaggcctgcgggacactgaaatcgagacgaaaaaccccgatatcccaggtatagctcccaccctgaacaagttgctcaaatgttaaacattgcttaccgctggcgaagttatcgctattaatgcctaaccgcttgataacttctctacttaaacatgtttcttgcgggttgtctttaacaataatctcatatttcccgcgccattgcttattgacataaatatcgatgtcatactgccccggtaagggttgattatcatcaagacgaatatttgcaacctgctggtctttcattccacctatcataaaatgggtatcaaaggtttcttcagctgcataagcttcaatgccgagcaataacgctacgattgcacttgcaagtggggtcattctcaacataggcagctcctgcaattaaattttgtcactaatatagttgccatggtcatcgataatggtcagatgccagttatttgcattattacttttgacattaacactctgactttctaagggggcaatcataatagtttcataattgactttgacattattagctttgacatcgctaatcgtcacccaattagcactgtcattttttatcaccaaaccattgccactgcgatttaccagcaattttttaaatgtcgctttatttaccggagcaatacccgctggccggtaaaacaacttaattctgttttgcatcgcaaacttcagtgcattcttaccttcttgctctggactatttggtggaatatccagaacattcagataaaaaatgctttctttattagtgggcagtttattcggcataattttgatttttacttgctgcccggaatttgcccctatttttgccactggtggcgttaacatgaaaggaacctgaattttttctggtggtaaactcgtatcgccatcatcaatccacgcctgcagcaggctagaacggtttccctggttcatcaactgcaccatcacttctttattttctgccgggtaaataatgcgcgtcccgtagataacaattccggcatgtgcaggaaggaccatagaaaaaatgagtaaagataataatcctttcattttaatgcctcttaaattaaaaggccgccatgggatagcggccatgtttattacctggagaaacttacaattttatttattaatcctgcgccacacgcataaccagagaagataacacatcaccactttgcacactgttatctgtcagtttcaggtattttgctttaaacggaatagcatattgaccttccgctgttttataactctcaatgttaaaaggtgcagaaacatccaggacatcgctgttatcacctaaatagagatagtaacccacggtatcgttgctactggctatcgccttatcgttaccggttattttatcgttggtaatcaagctgagttttacaccagcaacttctttcgggcagctaatttttaacatgctgctggttacaccgactgcatcatcataggtagaatatttagctttaccttcaaagacactggttggtacagtcggcatattaatacttacactatcaccacccgcttcgaatttacacggagattctgcaatattccccttaatagttaatgttccggtatcaacgtctgcagcaaatactccagcgctcataaaaaaagaagaaaagacagcggcagcaataatactacgtttcataatatgttccttaataaaatttatttttggttgttaagagtctgtatctcttggaaacaaatttctcacatcaaaaaagttgccgcaatgtaaacacattgttttattgatttaaaacaaattaaccattgcaatataaatacaaaaaatatttaagagtattaactatttatcgcatctatcaattaatgtagatttatgtaaatggtattgttgatatcaataaaaaagccgaaatcatttatataaatgatttcggctttctaaatgcaattaaaatcaggttgccaaattaatcgtagcgatttaacacgattcgacgtttgctatcgctacctgcaacaaccacttctgtcgttacacctttgacggggctagaaaacagatgacgggtgtcaacattatacgttaactgaccacaatgctgttgaggttgaccattaaccatagccatactgcatgttgggggactgatcctgccattaatcgctaatgtggcagtctcactagagaatgcgggagaagccaatccataggcaagaaaaataattccactcagccaatacttattcattgaacgttatccctgtagtaaaggttatgcctggatagaatgagtgcataacaaactatagctgtacatccactacacagccacgaaggatgataatgaagcattgcctgtatgatcaatcgactttgtagagtttcggacgaaggtccgcagaatattcgcagtattaaataagtgttcattaatgcggcaaaaactaatacaccgcatcaatgtaacatctctgcggtgtatgaagaataaccagaatggttaataggcgttagaccgcgcggaaggaaatctcgcctggaatgacttcaccctgccagtagagctgagctgcaacgcggtcagccagctggcggtagatagcggtaaattcgctctccggacggctgataaccgttggcgtacctttatcgagatcctcacgtaaggagatgtgtaacggcatctgccccagcagctgtgtatggtatttttcagccagtttctctgcaccaccggtaccgaaaatcggttcatggtgaccacagttactgcaaatatgcacactcatgttctcgacaataccgagcaccggaacctcgactttctcgaacatcacaatgccttttttcgcatcgatcagcgcgatgtcctgcggggtggtgaccacgactgcaccggttactggaatgttttgcgccagcgtcaattgaatgtcaccggtgcctggcggcatatcaagcaccagatagtcgagatccggccacaaggtttcctgcaacatctgcattaacgccttgctcgccatcggtccacgccacaccatcgcattgtcgtcagtgaccagataaccaatactattggttgccaggccatgagacataatcggtgccatatgggtaccgtccgggctagttggacgctgattttctgcgcccaacattgttgggatacttgggccgtagatatcggcgtccagaatgccgactttcgccccttctgccgccagcgccagtgccaggtttaccgccgtggagcttttacccacgccgcctttaccggaactcaccgcgataatgttcttcacaccgttaattcccggctgattcttcacgcgtttcagagtggctatgttatggctcagtttccagtcgatagctttcgccccggtgatgcgcagcagttcggcgctacattgctcttttaactcttcgaacgcgctatgccagacaaacggcataaccagttccacatgcaacgtgtcgtccatccaggcgacatggtgcaacgctttcagcgtggtgaggttatgcttcagggttgggtgctgaaaattggccagtgtcccggcgaccattgcgcgcaaggcttctggacttttggcctgggattgttcgttcatcccgactccttttttgtatagataaaccatcagctgatagtttacctgaagaatatagagaagtacttacttaacattttcccatttggtactatctaaccccttttcactattaagaagtaatgcctactatgactcaagtcgcgaagaaaattctggtgacgtgcgcactgccgtacgctaacggcagtatccacctcggccatatgctggagcacatccaggctgatgtctgggtccgttaccagcgaatgcgcggccacgaggtcaacttcatctgcgccgacgatgcccacggtacaccgatcatgctgaaagctcagcagcttggtatcaccccggagcagatgattggcgaaatgagtcaggagcatcagactgatttcgcaggctttaacatcagctatgacaactatcacagcacgcacagcgaagagaaccgccagttgagtgaacttatctactctcgcctgaaagaaaacggttttattaaaaaccgcaccatctctcagctgtacgatccggaaaaaggcatgttcctgccggaccgttttgtgaaaggcacctgcccgaaatgtaaatccccggatcaatacggcgataactgcgaagtctgcggcgcgacctacagcccgactgaactgatcgagccgaaaagcgtggtttctggcgctacgccggtaatgcgtgattctgaacacttcttctttgatctgccctctttcagcgaaatgttgcaggcatggacccgcagcggtgcgttgcaggagcaggtggcaaataaaatgcaggagtggtttgaatctggcctgcaacagtgggatatctcccgcgacgccccttacttcggttttgaaattccgaacgcgccgggcaaatatttctacgtctggctggacgcaccgattggctacatgggttctttcaagaatctgtgcgacaagcgcggcgacagcgtaagcttcgatgaatactggaagaaagactccaccgccgagctgtaccacttcatcggtaaagatattgtttacttccacagcctgttctggcctgccatgctggaaggcagcaacttccgcaagccgtccaacctgtttgttcatggctatgtgacggtgaacggcgcaaagatgtccaagtctcgcggcacctttattaaagccagcacctggctgaatcattttgacgcagacagcctgcgttactactacactgcgaaactctctagccgcattgatgatatcgatctcaacctggaagatttcgttcagcgtgtgaatgccgatatcgttaacaaagtggttaacctggcctcccgtaatgcgggctttatcaacaagcgttttgacggcgtgctggcaagcgaactggctgacccgcagttgtacaaaaccttcactgatgccgctgaagtgattggtgaagcgtgggaaagccgtgaatttggtaaagccgtgcgcgaaatcatggcgctggctgatctggctaaccgctatgtcgatgaacaggctccgtgggtggtggcgaaacaggaaggccgcgatgccgacctgcaggcaatttgcagtatgggcatcaacctgttccgcgtgctgatgacttacctgaagccggtactgccgaaactgaccgagcgtgcagaagcattcctcaatacggaactgacctgggatggtatccagcaaccgctgctgggccacaaagtgaatccgttcaaggcgctgtataaccgcatcgatatgaggcaggttgaagcactggtggaagcctctaaagaagaagtaaaagccgctgccgcgccggtaactggcccgctggcagatgatccgattcaggaaaccatcacctttgacgacttcgctaaagttgacctgcgcgtggcgctgattgaaaacgcagagtttgttgaaggttctgacaaactgctgcgcctgacgctggatctcggcggtgaaaaacgcaatgtcttctccggtattcgttctgcttacccggatccgcaggcactgattggtcgtcacaccattatggtggctaacctggcaccacgtaaaatgcgcttcggtatctctgaaggcatggtgatggctgccggtcctggcgggaaagatattttcctgctaagcccggatgccggtgctaaaccgggtcatcaggtgaaataatcccccttcaaggcgctgcatcgacagcgccttttctttataaattcctaaagttgttttcttgcgattttgtctctctctaacccgcataaatactggtagcatctgcattcaactggataaaattacagggatgcagaatgagacactttatctatcaggacgaaaaatcacataaattcagggcagttgagcaacagggaaacgagttgcatatcagttggggaaaagttggcaccaaagggcaaagccagataaaaagtttttcagatgctgcggcagcggcaaaagcggagcttaagctgattgcggagaaggtgaagaaggggtatgtggagcaagcgaaggataattctttgcaaccttcccaaacggtaacgggctctctcaaggtagcggacttatccaccattattcaggaacaaccctctttcgtagcagaaacccgtgcgcctgacaaaaatacagatgctgttttaccgtggctggcgaaagatattgctgtcgtttttccgcccgaagttgtacacaccacgttaagtcatcgccgctttcccggagttcctgttcagcaagcagacaaattgccccaattacgtcgcttagcctgtagtgtgtcgcaacgggataataaaacagccacatttgacttcagcgcctgttctttagaatggcaaaacaccgtcgcccaggcgatcagtcagatcgacggcctgaaaacaacacagttaccatcaccagtaatggctgtactcacggcacttgaaatgaaatgcacaagatataaagtgcgtgaggatgttatggatcagatcgtccaggaaggcggtctggaatatgctactgatgtaataatacaccttcaacagattgatattgaatgggattatgcgaataatgtcattattattctgccgtctggcattgcacctagctacttggagcaatattccagatttgaatgacgcctacgtaaacatttatcactgacggaagagtctctctggcaaaaatgtgcacaaaaacttattgccgcaattccacatattccagaatggcggcaaccattaattgctttgttattacccgaaaaaccagaaattgcacatgaaattgcccagcgtctactggggcaaaaaaaattaccctcgcttgagtggttaaaaatagtggcgactgatgagcacattcttgcctcattagaaaaatatcacgaaccatatgccatttttgatgattactattgtggtgcgatatggtcagccaccgtattacaggagcaaggtgttgcagccctgccccgatttgctccctatgccgcaagtgactactgcgccgatgtgttgcgtcatatcaatcatccgttcgcattgacactgcttatacgtgtagccgggcaaactaaacgctgtcacgatcggatgacgaaagccattgctgcgttcccacatgcagcaatggcggcactgacggaacttcttgggcaaaaagaagagaacagttggcgcattatgctaatgacaatgcttatctcacaaccagcactggcagaacaggtcattccctggctctcgacacccgcagttgccgtactgaaatcatgccagcaacaactgacacagccctcaaaccatgccagcgccgatctactgccagccgtagtagtctcccctccctggctttcgaaaaagaaaaaatcgccgattccggtgctggatttagcgccattaggcattgagccaatctgttatctgacagaagaaatcagtaatcaacttttggcgaaatatatctggtattcaaaacacatcacggttagccatgaagaaagtactaccaacctgttggcaaggatgggttttcaacgacggatcgctggtacatatattaaagctcccgaagcggtagttgaggcatggctaaatgaagattattcaaccttactaagtgaatttaaggtgtttcattcacctaccgggcattattggcagttggggattttgacaacattgccgctggagaaagcagtaaaagcatggaatgcccttaccctatctccacataccgataccgaatactccatgttacattttggactcaaagggttacctgggttagtaaactcacttgcacgctatccacaagaagccttgcccatcacgaattacttcgcagcgagtgagctggctcctgccgtcgcccgtgccttcaacaaactgaaaacgctacgcgaaaacgcccgtagctggctgttgaaatacccggaacatgcccttaccggcctgctgcctgcggcgctcggcaaagccggtgaagcacaggataacgcccgcgctgccttgcgtatgcttaccgaaaacggtcatcagccattactgcaagaaatcgcccgacgttataaccagccggaagtaaccgatgcggtgaacgctctgcttgcgctcgatcccttagataatcacccgacaaaaatccccactcttccggccttttatcagccatcgctctggacgcgcccggtattaaaagcaaatgcccaatcactgccagatagcgccctcctccaccttcggtgaaatgctccgcttccctcaggaagaggctctgtatccgggattattgcaggtgaaagacgtctgttccgccgactcactggcgggatttgcctgggatctgtttaccgcctggcagaccgctggcgcgccgtcgaaagagagttgggcgttcactgcgttaggcgttctcggtaacgatgacaccgcccgcaaactgacgccattaatacgcgcctggcctggtgaatcccagcataaacgcgccaccgttgggttggatattctcgctgctatcggtagtgatatcgcccttatgcagcttaacggcatcgcccagaaactgaaattcaaagcattacaggagcgggcaaaagaaaaaattgccgacattgccgagagccgcgaactcacggtggcggagcttgaagatcgggttagcaccggatctcggtctggatgataacggttcgctgctgctggattttggcccacggcagttcaccgtcagctttgatgaaaccttaaaaccgtttgtgcgtgatgtttccggcagccgcctgaaagacctgcccaaaccgaacaaaagcgatgatgaaacgcgggcgaacgatgcggttaaccgctacaaattgctgaaaaaagatgcgcgtaccatcgccgcccagcaggtagcaaggctggaatccgccatgtgcctgcgccgccgctggtcgctggaaaacttccagctcttcctggttgagcatccgctggttcgtcacttaacccgccgtctgatttggggcgtttatagcgccgaaaaccagctactggcttgctttcgcgtagcagaagataacagctccagcaccgctgacgatgatcttttcaccctgccggaaggcgatatctctatcggcactcctcacgttctggaaatatcaccaacggatgctgccgcctttggtcagctttttgccgactacgaactgctaccaccgttccgccagctcgaccgtaacagctacgccctgacagaagccgagcgcaatgccagtgaactgacccgctgggcaggcagaaaatgcccgagtggtcgggtcatggggctggcgaataaaggctggataaagggcgaaccacaggatggaggctggatcggatggatgatcaaacctttgggtcgctggtcgttaatcatggaaatcgatgaaggctttgcggtaggcatgtcgccagccgaactcagcgctgagcagctcttaagcaagctgtggctatgggaaggcaaagcagaaagatatggctgggggagtaattcaacacaggaagcgcagttctccgtaatcgatgccatcaccgccagcgagctaattaacgatattgaagccctgtttgaataaggaaagagcatggacaaggaattaccgtggctggcggataacgcccaactggaactgaaatataaaaaaggcaaaacgccgctcagtcatcgtcgctggccgggcgaaccagtgtccgttatcactggaagtctcatccagacattgggtgatgaattgctacaaaaagctgagaagaaaaaaaacattgtctggcgttatgagaattttagtctggagtggcagtccgccatcacgcaggccatcaacttgatcggcgaacacaaacccagtatcccggcccggacaatggcggcgctagcctgtatcgcgcaaaatgacagccaacagttgctcgacgaaatcgtccaacaagaggggctggaatatgcgactgaggtggtgattgcacgccagtttattgcgcggtgttatgagagtgatcctctggtagtgacattgcagtatcaggacgaggattatggctatggttatcgcagtgaaacctataacgaattcgatctccgactgcgtaagcatctctctctggcagaggaaagctgctggcagcgttgcgccgacaaactcattgccgcactaccaggaataaacaaagttcgccgcccttttattgcgctgatcctcccggaaaaaccagaaatagccaatgagttggtaggccttgaatgcccgcgaactcattttcattctaaggagtggttaaaagttgttgctaatgaccccacagcggtgagaaaactcgaacactactggagccaggatatatttagcgatcgagaagccagctacatgagccatgaaaaccacttcggctacgcggcctgcgccgcccttttgcgcgaacaaggactggcagccattccgcgcctcgcgatgtatgcccataaagaagattgcggcagtctgctggtacaaattaaccatccgcaagtcatccgcaccttgctactggtggctgataaaaacaaacccagcctgcaacgtgtagctaaataccataaaaacttcccccatgcgacgctcgccgcactggcagaactgctggcgttaacagaaccaccagcccgccctggttatccaatcatcgaagacaaaaagctgcctgcacagcaaaaagcacgcgatgaatactggcgtacgctgttacaaacgctgatggcaagccagccacaactggcagcagaagtgatgccgtggttaagtactcaaccccagagtgtgctgaagagttatttaagcgcaccgcccaaaccggttattgatggcaccgataacagcaatctgccagaaatcctcgttagtccaccgtggcgtagtaagaaaaaaatgacagctccacgtcttgatttggcaccgctcgaattaactccgcaagtttactggcaaccaggcgaacaagagaggcttgccgccactgagcctgcccgttatttcagcacggaatctcttgcgcaacgcatggaacaaaaaagtggacgagttgtattacaggaactgggttttggggatgatgtatggctgtttctgaattatatactccccggaaaactggatgctgcacgcaatagtctctttgttcagtggcattactaccaggggcgggttgaagagatcctgaatggctggaactccccggaagcacaattagcagaacaggcgctccgcagcggtcacatagaagcgttaattaacatatgggaaaatgacaactacagtcattatcgtccggaaaagagtgtctggaacctgtatttattggcacagttgccgcgtgagatggctttgaccttctggctgcgtatcaatgagaaaaagcatctgttcgcgggtgaggactattttctcagtatcctcggattggatgcgctaccaggtctgctgttggcttttagtcatcgtccaaaagaaacatttccgttaattttaaattttggcgcaacagaactggcgctgcctgttgcccacgtctggcgacgtttcgcggcgcagcgtgatctggctcgccagtggattttacaatggccggaacatacggctagtgcacttatccctcttgtctttaccaaacccagcgataatagcgaagccgcattacttgccctgcgtttactgtacgaacagggacatggcgaattgctacaaaccgtggcaaaccgctggcagcgtacagatgtatggtctgccctggagcagttgcttaaacagggtccaatggacatttacccggcacgcattccaaaagcccctgatttctggcatccgcaaatgtggtccaggccgcgccttatcactaataatcaaactgttaccaatgacgctctggaaattatcggcgaaatgctgcgctttacccaggggggacgtttttatagcgggctggaacaactgaaaacgttctgccagccacaaacgctggcagcttttgcctgggatctcttcactgcgtggcaacaagctggtgcccccgcaaaagacaactgggcatttctggcgttaagtctctttggtgacgaaagcacggcacgggatctgacgacacagatcctcgcctggccacaagaaggcaaatctgcccgtgctgtcagcggcctgaacatccttaccctgatgaataatgatatggcgctgatacagctgcatcatataagccaacgggctaaatcccgccccttacgtgataacgcggcggaatttcttcaggtggtcgcagaaaatcgcgggctaagccaggaagagctagcggacagattagtcccaaccctgggccttgatgatccgcaggcgttgagttttgattttggtccccggcagtttaccgttcgcttcgatgaaaatctcaacccggttatctttgatcagcaaaacgttcgccagaaaagcgttccccgtttgcgcgccgatgacgatcaactgaaagcgcccgaggcactggcccgactaaaagggctaaaaaaagatgctactcaggtgagcaaaaacctgctcccgcgtcttgaaacggccctacgtaccacccgacgctggagcctggcagattttcattctctgtttgttaatcatccctttacccgtctggttacccagcgattaatatggggggtttatccggcaaatgaaccgcgttgtttactcaaagcctttcgtgtggccgcagagggggagttctgcaatgcgcaagatgagccaattgacctgcctgcggacgctctgattggcattgcccacccgttagaaatgacagcagaaatgcgcagtgaatttgcacagctttttgccgattacgaaattatgccgccttttcgccagttgagccgccgcacggtgctgctcacacctgacgagagtaccagtaacagcctgactcgctgggaaggtaaatccgctaccgttgggcaacttatgggaatgcgatacaaaggctgggagagtggctatgaggacgcatttgtctataacctgggtgagtaccggctggtccttaagtttagtcccggttttaaccactacaatgttgatagcaaagcgctaatgagcttccgttctcttcgagtgtaccgtgacaataaatccgtcacttttgccgaacttgatgtgtttgatttgagtgaggcgttaagcgcacctgacgtcattttccattaaaacacagcgggcagtgatgcaactgcccgttatcaacacgacttaccagcggggaaagcgatgatcgtgcaaaaagagctggttgctatttacgattatgaggtccctgtacctgaagatccgttttccttcagacttgagatccataaatgctctgaattatttacaggttccgtctatcgactggagcgattccggctacgtccaacatttcatcaacgtgatcgagaagatgctgacccgctaataaatgatgcgttgatttatataagagatgagtgtattgatgagcggaaattacgaggtgaaagtcctgaaactgtaatagcaatttttaatcgtgaactacagaatatattcaaccaagaaatagaataatatactctaaataattcaaattggtccgatccggcgcaacgtcccaatggcctggattataaatctcattatcttaattgcaacggggtccagccgtggttataattcgttcgttggaacacgatgttgcacaggctgtggtgttaggcctgaaaatagtaaataaaagaacctgcctcaccagcaggtttttttatttactgtgatctgctttccagatatttttcgctcaaacaactaatgcgccaaacatttattgcgcgtaaaatatcgtttatttcattaatacatttcagggatgaatatatgagtccgcagaataatcatctgcagcgtccgcctgctgctgtgttatacgccgatgaactggcaaaattaaaacaaaatgataacgcaccttgcccgcccggttggcagttaagtttgcctgcggcccgtgcttttatccttggcgacgaagcgcaaaatatcagccgtaaagtggtgattagcccctccgctgtcgaacgtatgttagtcactcttgctaccggccgcggtttgatgttggtgggggaaccgggtaccgcaaaatctcttctttctgaattactggcaaccgctattagcggcgatgccgggttaaccatccagggcggggcatctaccaccgaagatcaaatcaagtatggctggaactacgccctgcttatcaatcatggtccgagtacggaagcgctggtccctgccccgctttatcagggaatgcgcgacggcaaaatcgtccgtttcgaagagataacgcgtacaccgctggaagtgcaggactgtctgttaggtatgctttctgacagggtgatgacggggccggaactcactggtgaagccagtcagctctatgcgcgagaaggctttaatattattgccactgccaatacccgcgatcgcggcgtcaatgaaatgagtgctgcgctaaagcgtcgcttcgattttgaaacggtttttccgattatggatttcgcccaggagttggaactggtcgccagtgctagcgcgcgtttgctggcccatagcggtattccgcataaagtgcctgacgcggtactggaattactggtccgcaccttccgcgatctgcgtgccaacggcgaaaagaaaacgagtatggatacactgacagcgattatgtccaccgctgaagccgtgaacgtggcccatgctgtgggcgtccgcgcctggtttttagcgaatcgcgcgggggagcctgccgacctggtggaatgtattgccggaaccatcgtcaaagataacgaagaagatcgcgcgcgtctgcgccgttacttcgaacagcgtgtcgccacacataaagaagctcactggcaggcttattatcaagcccgccaccgcctgccgtgaggaaagatgcatgagcgagccgttaattgtcggcatccggcatcatagtccggcctgcgcccggctggtgaaaagcttaatcgaaagccagcggccacgatacgtgttgattgaaggcccggctgattttaatgaccgggtagacgaactgtttttagcccaccagcttccggtagctatttacagttattgccagtatcaggacggtgcagcccccgggcgtggtgcctggacgccatttgctgaatttagcccggagtggcaggcgctacaagccgcacgtcgcattcaggcacaaacttacttcatcgatttgccttgctgggcgcagagtgaagaagaggacgatagccctgatacgcaagatgaaagccaggccttactgctgcgtgccacccgcatggataacagcgataccctgtgggatcacttgttcgaagatgaaagccagcaaactgcattaccctctgcgctggcgcactattttgcccaactgcggggcgacgcctccggcgatgcgctcaatcgtcagcgcgaagcctttatggcccgctggattggatgggcgatgcagcaaaataatggcgacgtgttagttgtctgcggtggctggcacgctccggcactggcaaagatgtggcgcgaatgccctcagaaaattaacaagccagaattgcccagcctggcagatgccgttacaggttgttatctcacaccctacagtgaaaagcgccttgatgtgctggcaggataccttagtggaatgcctgccccggtatggcaaaactggtgctggcagtggggcttgcagaaggccggtgaacaactgctaaaaactatccttacccgtttgcgccagcacaaattgcccgcttctaccgcggatatggctgccgctcatctgcatgcgatggcgctggcacagttgcgcggtcatacactaccgttacgcactgactggctggatgccatagcaggcagcctgattaaagaagccctgaacgcgccgttgccgtggagctatcgcggcgttattcatcccgataccgatccgattctgctaacgttgatagacacattagcgggtgacggattcggtaaacttgccccttctacgccacaaccgcctctgccaaaagatgtcacctgcgaactggaacgtaccgcaatctcccttccggcggagcttaccttaaatcgctttacccccgatgggctggcgcaaagtcaggtgttacatcggctggcaatactggagatccctgggattgtacgccagcagggaagtacactgacacttgcaggcaacggtgaagaacgctggaaattaacccgcccgcttagccagcatgcggcattgattgaggccgcctgttttggtgccacactccaggaagccgcacgcaataaattagaagccgatatgctggacgcgggcggaatcggcagtatcaccacatgtcttagccaggcggcgttagcgggtctggcgtccttcagtcaacaattactggagcaactcacactattaatcgcccaggaaaatcaatttgccgaaatgggccaggcgctggaagtgctttatgccttatggcggctggatgaaattagcggtatgcaaggcgcgcagatattacaaacgacgttatgcgcgactatcgatcgcacgctgtggctgtgtgaatctaacggcagaccggatgaaaaggagtttcacgctcacctgcatagctggcaagcgctttgccatattctgcgcgatctacatagcggcgttaatttacccggcgtttctctttctgcggcggtagccttactggagcgacgcagtcaggcaattcatgccccggcgctggatcgcggcgcggctcttggcgcactaatgcgtctggaacatcccaacgccagtgccgaagcggcgctgacgatgctggcgcagttatccccggcacaatctggtgaggcgctgcacggtttgctggcgctggcccgccatcaactggcctgtcagccggcatttatcgccggtttcagcagtcatttaaatcaactgagtgaagccgattttattaacgccctgcccgatttacgcgcggcgatggcctggctaccaccacgagaacgcgggacgctggcgcatcaggtgcttgagcattatcaactggcgcaacttcccgttagcgcgctgcaaatgccgttgcattgtccaccacaggccattgcacatcatcaacaactcgaacagcaggcactggcaagcctgcaaaactggggagttttccatgtctgaactgaacgatcttctgaccacccgtgagctacaacgctggcgattaattcttggcgaagcggcagaaacgacgctttgtgggctggatgacaacgcccggcagatagaccacgcgctggagtggctgtatgggcgcgatcctgaacggctccagcgtggtgaacgttccggtggattaggtggcagtaatctcaccacccctgagtggatcaacagtattcacacgctgtttccgcagcaggtgattgagcggctggaaagcgatgccgtgctgcgctacggcattgaagatgtggtgacgaatctcgacgtgctggaacgtatgcagccttctgaaagcctgctacgcgctgttttgcacaccaaacatctgatgaaccccgaagtactggctgccgcccgccggatagtgtgccaggttgttgaagaaattatggctcgactggcaaaggaagttcgtcaggctttttctggtgtccgcgatcgccgtcgccgtagttttattccactggcgcgaaactttgatttcaaaagtactctgcgcgccaacctgcaacactggcacccgcaacacggcaagttgtatatcgaatccccccgctttaacagccgcattaaacgccaaagcgaacaatggcaactggtcttactggttgatcaaagcggaagcatggtcgatagcgtgatccactctgcggtgatggcggcctgtttgtggcagttacccggcattcgtacccatctggtggcgtttgacacaagcgtcgttgatctcacggcagacgttgccgatccggtagagttattaatgaaagtacagttgggcggcgggaccaatatcgccagtgccgtggagtatggtcggcaacttattgaacaaccagcgaaaagcgtcattatcctcgtgagcgatttttacgaagggggtagtagtagtttactgacgcatcaggtgaaaaagtgtgtccagagcggcatcaaagtgctgggactggcagcgctcgatagcaccgcaacaccttgctatgaccgcgatacggcccaggcgctggttaatgtcggcgcacaaatagccgccatgacgccgggcgagctggcaagttggcttgcggagaatcttcagagttgacataacttgcggagaatcttcagtcatgaatagtctacgtccggaattattagaactgacaccgcaggccctgacggcgttaagcaatgccggttttgttaagcgcagtcttaaggaactggaaaatggcaacgtcccggagatcagccatgagaacgacgctttaatcgccaccttcagtgacggtgtccgtacccagctggcgaacggccaggcactgaaagaggctcagtgcagttgcggggccaacggtatgtgccgtcatcgcgtgatgctggtgttaagttatcaacgactttgtgccaccactcagtctacggaaaaagaagaagagtgggatccggcaatctggctggaagaactggctacccttcccgatgctacccgcaaacgcgcacaggcgctggtcgctaaaggcatcaccattgagttgttctgtgcgccgggtgaaattccctctgcccgcttaccgatgagcgatgtgcgtttttattcccgcagcagtattcgtttcgcccgttgtgattgtattgaaggcacactttgcgaacatgtcgtactggcggtacaggccttcgtcgaggccaaagcgcagcaagcagaatttaaccatttaatctggcagatgcgcagcgaacacgtcacaagttctgacgatccgtttgccagcgaagaaggcaacgcgtgtcgtcaatatgttcagcaattaagccagacattatggcttggcggcatcagccagccgctcatccattacgaggcagcattcaaccgcgcattgcaggcggcagagacctgcaactggcgctgggtgagtgaaagcctacggcaactgcgcgccagcgttgatgccttccacgcccgcgccagccactataatgccggagaatgcttacatcagcttgcggcattaaacagtcgattaaattgcgcacaagagatggcccggcgcgacagtattggtgaagttcctcctgtgccgtggcgcacggtcgttggctctggcattgccggagaagcaaagcttgatcatctgcggctggtgtctttaggtatgcgttgctggcaggatattgagcattatggtttacgcatctggtttaccgatcccgacaccggcagtattttgcaccttagccgcagttggccgcgaagtgaacaggaaaacagtccggcagctacgcgtcggctgtttagttttcaggctggcgcactggcgggcgggcaaattgttagtcaagcagcaaaacgcagtgccgatggcgagctgctgttagctacccgcaaccgcttaagcagcgttgtgccgctgagccctgatgcctggcaaatgttgagcgcgccgttacgccagccgggcattgtggctttgcgggaatatttacgccagcgtccccccgcctgcatacggcctcttaatcaggtcgataacttatttattctgccggtcgctgagtgtattagcctcggttgggacagcagccgccagacgctggatgcgcaggtcattagcggcgaaggggaagataatgtgctgacgttaagtttaccagccagtgccagcgcaccttatgccgttgaacgcatggcggcgcttttgcaacaaacagacgaccccgtgtgtctggtttctggctttgtcagttttgttgaagggcaattgacactggaaccacgggtgatgatgacaaaaacccgtgcctgggcgctggacgcagaaactacgcctgtggcaccgctaccttctgccagcgttttgcctgtgccgtctactgctcatcagttgctgatacgctgccaggcgttacttattcaactgctccataacggctggcgctatcaggaacagagtgctattggtcaggcataattgctggcgaatgacctcaccgcggtgggtttttatcggctggcacatgtgttgggacaatttcgtaatacagaaagcgaggcacgggtagaagcaatgaataacggtgttttgctttgcgaacaattattccccatgcttcagcaacaaggatgaaatagtgctttttactaagagttctactccagttccggactgctcacgccacggtattaggcatatcctatatagcccctggtgagagtcaccagttccttgattaaataaaatggagttttacatgaaggctttcaataagctgttttccctcgttgttgcatctgttctggttttctctcttgctggctgcggtgacaaagaagaaagcaagaaattcagcgccaatctgaacggcactgaaattgccattacctatgtctacaaaggtgacaaggtgcttaagcaatcttctgaaaccaaaattcaatttgcctccattggtgcaaccaccaaagaagatgctgccaagacacttgagccgttaagcgccaaatacaaaaacatcgcgggtgttgaagaaaaattaacctataccgatacctacgcgcaggaaaacgtgactatcgatatggaaaaagtggattttaaagccctgcagggtattagtggaatcaacgtttctgctgaagatgccaaaaaaggtatcactatggcgcaaatggaactggtgatgaaagccgctggttttaaagaagtgaaataatcggttggcggtcatgctctaaacatgaccgccaattttttagccttttttcacatgctggcgcgctgccagtccacgcagaaaataacgtaaaaattgatcgccgcattcgcggaagtttttatgatccggtgcgcgcatcatcgctgtaatttccggcatgctaacgcggaactgctgttcggtgaggatagccagaatgtcatcggttttcaggctaaacgcgatgcgtaattttttcagcacgatgttgttattaatgcgacgttccggctccagtgccggagcagactcatccttgccgcgtttttcataaatcaggccattgaggaaactgctcaaaacaatgtccggacaacgctgaaaaccctcttcgtcttctttacgtagccagacggcgatctgttccgcggtggcttcgacattacccagcgccagaatacgcaccaggtcattattattggctttcaaaatgtagcgcacgctgcgcagaatatcgttacttagcatgaggccttcaggtgttgatgaggcaaaaagccattttagcagtcttttacaggccaatcgcctcttttaagcttttcagataacggcggctgaccggcacggttaagccattacgcaaaatcaactcggcctggccgttatcttccagacgaatctcctgtaaatgcgcgaggttaaccagatactgacgatggcagcgcagtagtggtgtacgactttccagggtacgtaatgtcaattcggtaaagccctctttcccttcgtggctggtaacgtagacaccgctcatccgactgctgacaaatgccacatctttcatttgcagcaaataaatccgactatgccccgtacaagggataaatttcagcgcctgttgattttccggtaacaggctaacatcctgcttgctgcgctcctgacgcaatcgcgccagcgttttctccagtcgcgcttcatcaattggcttcagcagataatcaaaggcatgttcttcaaaggctttaattgcgtattcgtcaaacgcagtgagaaaaacaatatacgggcgatgttccgggtcaagcatccccaccatttccagaccactgatgcgcggcatctggatatcgagaaacagcacatccgggcgcagtttatgcaccgcgccgatcccttccacggcgttactacactctccaacgatttcaatatcgctctgctcctgcaaaaatacacgcaggttctcccgtgctaacggttcatcatcgacaattaagactttaatcatgcctcgtccctccatggtagtcgtaacgttattcgggtgtaactatcaggctcacaggcgacgcttattccatagtcatcgccaaaccgttcacgtaaacgcttatccaccagattcatccccagcccactggcattggttaccggttgatacaaaccggcattgtcttcgatctccagcatcaaatgttgcccctcacgtcgggcgctgattgccactcgccctgtatccagcagttgacttgtcccatgtttaatggcgttttccactatcggttgcagggtaaacgcgggcaattgctgctgggataattcttgcggaatagcaatgttgacctgcaaccggctctggaagcgcgccttttcaatttgcagataagcattcacatgttcaatttcgtcggcgagagtaacaaactcgctaggccgctttaagtttttgcggaaaaaagtggaaagatactgcaccagctggctggcctgttcgctgtcgcggcggatcaccgctttaatggtgttaagcgcattaaacaaaaaatggggattcacctgggcgtgaagcagtttgatctcactctgggtgagcatcgctttttgccgctcatattgcccggcaaggatctgcgcgctaagcaattgcgcaatcccctcacccaacgtgcggttgatgctactgaataaacggtttttggcttcatacaatttgatggtgcccatcacccgctgattttcaccacgcaacggaattaccagcgtgctccccagtttgcattgcggatgcaaagagcaacggtaaggtacttcgttgccatcagcgtagaccacttcaccggtttcaatcgcttttaaagtataagtactagaaatcggtttgccgggtaaatggtggtcgtcaccaattccggtaaaggccagcaatttctctcgatcggtaatcgcgactgcaccaatatccagttcctgatacagcacctgagccactttcatgctgttcacttcgttaaacccctggcgcaaaatgccttccgtgctggctgccactttcagcgcagtggcagaaaaagcgctagtgtatttttcaaacatcgcgcgtttatcgagcaatatacgcataaacagcgccgcgccgacggtattggtgaccatcattggcgcagcaatattactcaccagacgcaccgcatcttcataaggtcgggcgatcgcaaggatgatcagcatttgcaccatttcagcgacgaacgtgacggcaccggcggtaatggggttaaagactttatcagtgcgcccgcggcggatcaggatgctgtgtaccaggccaccgagtaatccttcaacgatggtgctgatcatgcaacttaacgcggtcatgccccccatgctatatcgatgtaagccgccggtcagcccaaccagcccaccgacgaccggaccgccgagtaagccgcccattaccgcgcctatcgcacgggtattggcaatagaatcgtcaatgtgcaacccaaaccaggtgcccatgatgcagaagatggaaaagacgatgtagcagagaaatttatgcggcagacgaaccgtgacctgcattaacggtatgaataatggcgttttactcattaaccatgcaatgactaaaaaaacgcacatctgctgaagcagcagcaacaccagattaaaatcgtacatacccgcaaaccacacttccctttaaaacgcgtaacatacattgcctgcgtttaactttctttgaactcttgcagaaaaatgagaattcgtgagtacgatcactcaaaatcgcctggcaaaaataaaatcaccctatagatgcacaaaaaacgggcaaaactacctggttcgcaaaactgcgtctaaagttaaaccgggacctcgcgagcaagggtgagacgatggcgctttacacaattggtgaagtggcgttgctttgtgatattaatcctgtcacgttacgcgcgtggcagaggcgttacggattgctgaaaccgcaacggacagacggcggtcatcggctgttcaacgatgccgatattgaccggatccgcgagatcaaacgctggatcgacaacggcgtgcaggtcagcaaagttaaaatgctgctcagtaatgaaaatgttgatgtgcagaacggctggcgcgatcagcaagaaacattactgacttacctgcaaagcggcaatctacatagcctgcgaacgtggatcaaagagcgcggtcaggattaccccgcccagacactcaccacacatctgtttattcctctgcgccgacggcttcagtgccaacaaccgactctccaggcgctgctggcgatcctcgacggcgtactgatcaactacatcgccatttgtctggctagcgcacgtaaaaaacagggtaaagatgcgctggtggttggctggaatattcaggataccacccgtctgtggctggagggctggattgccagtcaacaaggatggcgcattgatgtcctcgcccacagcctcaatcaactacgccctgaactattcgaaggccgtacattgctggtgtggtgcggtgaaaatcgaacctccgcccaacagcagcaactcaccagttggcaagaacaaggccatgatattttcccactcggcatttaatgattcgttaacaaatgcgctttactgtacaatcctttcgttaacataaggagtgcattatgcgcatagctaaaattggggtcatcgccctgttcctgtttatggcgttaggcggaattggtggcgtcatgctcgcaggttatacctttattttgcgtgctggctaagcgcctgcaccagcctttcaaacaggcggtctgcgatgatcgccgccagtgccaccagtaacgccccctggatcacatacgcggtattaaatccgctaagcccgatgatgatgggcgtacccagcgtgctggcccctaccgtactggcgatcgtcgccgtaccaatgttgataatcacgctagttcgcacgcccgccagaatcaccggagccgccagcggtagctcgaccttacgcactcgctgaccacgactcattcccatacctttcgcaacttctgtcacgctggcatcaatcgctcccagcccggcaagtgtcgcctgcaggacgggcagcacaccgtaaaggatcaaggcgataatcgctggttgcagaccaaagccgatcaccggaacggcgatcgccagcactgcgacgggcggaaaagtctgtccaacggcggcaatagtttccaccagtgggcgaaattccgcgccccacgggcgagtgacagcaattccggcaccagtgccaatgatcaccgcaaacaaactgctaattcccaccagccagaaatgagccagtgccagagctgcaaaactttcttgctgataaacgggtcgtggcagttgtgggaacaaggcagcaaacagcggctggctgtaaggcagccagaaaatcagcgccacaaacagagcaatgagccagaacagcggatcgcgcaacatcttcatacgcttacgcctccaccagcagatcctgaaaatgcagcgtgccgcaaggctggccctgcatgttcaccaccggcagcacctcgcatccccgcgcaacaaacagagagagcgcatcgcgtagcgtcatctcttctgccagtgcctcaccatctgctcgttcttcgcgacgcacgtaatccgccacactacgtaagctaagcaggcgcacacccagttcactacgtccaaaaaactggcggacaaaatcattcgccggacgagtcagcatcgtcagcggattgccctgctgcactacttcaccgtgatccatcaataccagatgttctgccagccgtagcgcctcatcaatatcatgagtgaccagcacaatggtacgccccagcaaacggtgaatgcgcgtcatctcttgttgcaacgcgccgcgcgttaccgggtccagtgcgccaaaaggttcatccattagtaagacttgcggatcggcagccagtgcacgcgccactcccacacgttgctgctgaccaccggaaagctgatgcggataacgctcacgcaaattactctccagccccagtagcgccattaattcgtcgatacgatcgtcaatccgcgcccggctccatttttgtaattgcggcacggtagcgatgttttgcgccacgctccagtgggggaacaggccaatagattgaatggcatagcccatccggcggcgcaactccagtactggcaggctgcgaatttcttctccggcaaagcggatctctccgctgtcatgctccaccaggcggttaatcattttcagggtggtggatttgccggagccagatgtgccaatcagcacgctaaaactcccttcctgaaaattgagattgagatcgttaacggctttttgtgcgccgaacagtttgctgacatggctaaattcaatcattacgtttcaccttcagcagtgcgataagcaaatcgaacagcgcgtcggtaagcaccgccagaacaattaccgggatcacccccagcaacactaaatcaatggcgctgcttagcagcccctggaaaaccagcgcaccaaaaccgcctgcgccgattaacgccgcaatcaccgccatacctacagtttgcaccatcaccacccgcaggctgcgcagaaataccggtaacgccagcggtaactgaacatgcaggaaacgctgcgccccgctcatccccatcgctctggcgctttccagcacatcgcgcgggatctggttcaaaccgactaccacgccgcgcaccagcggcagcaaggcatagagcaccagcgcaatcagtgcgggtgtcattccggttcctgctatgccgagcgtccccagccacggaaaggccgtaaccagcgcggcaagcggcgcaatcaacaggccaaagagcgccacgctaggcacggtctgaatcacattgagcagagaaaaaattgccccctgccgagcagtggaaaagtagcaccagatgcccaacggcacaccaatcactaacgcaggcagcaccgcaccaaacagcaacgtcagatgttgtgccagcgcgtcgtcaaacacatcctgacggttggcgtattctttcattagactgagatcgttaagcgtgccggagtacagcaaccacagcggaataatggcaatctgcatatgcaacaaccagcgccacagcggatgcgtggagattcggcggatggcatcgctacaggccagcaatgccagcgccgcagccagccagaaaccactgccgaggctggtacgcgccagcgcactgccattttgcgccagttgggtcgccgcctttccagctccccacaccagcaatacgaagacgaattgcgccagaatgagtgcacaaatgctgccttttttaccgggaataaaacaggccgtcagccaggcgcaaccaacgcccaccagcatccagatcgtttgcggccacagctgccagagatgacgcccctcaccgctaactaaacgattaggcgcgtaactgataaacggcagcgccgctgcgattgccgtcagcaacagcagcagcgccagaacaggattaatacggaaataagtcacgggaaattacttcgtccaccctttttgtttcaggtagtcggcagccacttttttggcatccagtccttccacagcaatgctggcattcagttgctgcaatgtttttgcatcgaggctggcgaagactggctgtagccactgtgccatttgcggatactccctcaacacgctctcacgcaccactggtgcaggcgcgtagataggttgcacaccttgcggatcgcttaaggtttgcagccccagcgccgctaccgggccgtcagtgccgtaagccattgcagcattaacgccagaggtttgctgggcagcggctttgatcgtcaccgccgtgtcgccaccagccagactcagcaactgatcctgaccgagcttaaagccataggctttttcaaacgcgggtaacgcatcggcgcgttcgataaactctgcgctggctgccagtttgaaggtgccgccctcttgcagataacgactcaggtcggcaaggctagtgagtttatttttctctgccacatcctgacgcacggcgatagtccaggtgttatttgcaggcgcgggcgtcagccagattaacttgttgtgctcgctatcgagctttttgactttctcgtaaccttgctgcgcgtttttccacgctgcatcgttttcatctttaaagaagaaagcgccattgccggtatattccggatagatatccagttcaccggaagtaatcgccccgcgcaccacaggagtcgttccgagttgcactttattcaccgtcggtacgccgtggctttccagcacctgcaaaatgatattgccgagtagcgcaccttcggtatcgattttactaccgactttaacgggggaagccgcctgtagcggcaggctcacggctgccaacataaccagactacctgcccagagctttaagagtggcatgatgctttcctcattcttttactgttgttttcagcgaattaagagaaaagcatagttgataatggcggggttagcttgagcggaaggattcagttgcagaatcagataaatacttaagaggcatattcggtccggcgtttcctgccggatgcggcgcgagcgccttatccggcctacaaagggcgcaaacgtcgcgcccttactaaagcattacagcaactcaaactcgcctttcttaacgcgtgcggaatcagtgccgataaagacattgaacttgccaggctcggcgtcatatttcatctgttgattccagaacttcagcgcctcaatatcgatcgggaagctgacagtctgagtttcgcccggtttcagggtgattttctcaaagcctttcagctgtttcacagggcgactcatggaagccgtcacatcctgcaagtacatctgcactaccgtggcaccctcgcgcttaccggtgttcgtcacctgcacgctggcagtcactttgccgtcacgcttcatggtcggcgcagaaagtttcacatcagagacggtgaaagtggtgtagctcagcccatagccgaacggatacaacgccccgttagcttcatcaaaataacggctagtgtatttgttcggcttgtcggcattatacgggcgaccggtattcagatggctgtagtacaccgggatctgcccgacagaacgcgggaaggacattggcagcttgccggacgggttgtaatcgccaaacaatacatcggcaattgcattaccgccttcagtccccgcaaaccaggtttccagaatcgcatcagcctgctgatcttctttcaccagcgccagcggacgcccgttcatcagcaccagcaccagcggtttaccggtggctttcagcgccgcaatcaagtcacgttggctttgcggaatagtgatatcggtccggctggaggcttcgtgcgccatcccctgtgcttcaccgactacagccaccaccacatcagattgtttcgccgtctgcaccgcttcatcaatcatctcttgcgggctacgcggatcgactttgaccgcttcttcatactgattcaggaaatcgataatgcctttgtcactggtaacgttcgcccctttggcatacagcactttaccgttttcaccgacggcatttttaatcccggtcagtacggtcacggattgatcggcaacaccggctgcggaccagctgcccatcacgtcacgtttactgtccgccagtggcccaaccaccgcaatggtggcgctttttttcagcggtaacgtttcgagacggtttttcagcaacaccaagctttcgcgcgccacttcacgcgcttctttacggtgcaggcggctttcggcattggtatccaccgggtcagactctttcggccccaaatggctgtatgggtcgttaaacaaccccatatcatatttaacgttcagtacatggcgggcagcatcgtccagctctgccatcgtcactttgccggatttaatcaacccaggcagatacttgctgtagtactcgtcgctcatgctcatgttgattccggatttcagcgccacgcgcaccgcatcttccgggtctgccgccgtgccatgtttaatcagctctttgattgcaccgtgatcggaaacggtgatgcctttaaagccccactggtcgcgcagaacatctttcagcagccaggaatcggaggtggctggcgtgccgttcaggctgttcagcgccaccatcaccgcgccgctgcctgcgtccagccccgctttgtacggcggcatataatcattaaacaggcgctgcggactcatatcgacggtgttgtactctttaccgccttctaccgcgccgtatgcggcaaagtgtttgacgctggtcatcacgctgtagcgatctgccgggcttttaccctgcatcgcttccaccatggttttacccattgtactggtgagatacgtatcttcgccaaaaccttcggaagcacgtccccagcgcggatcgcggctgacatcgaccatcggtgcccaggtcatattcaggccatcatctgccgcttcataagcagagacacgtccgaccgttttcactgcatcgaggttaaaagagctggccagaccgaggctaatcgggaacaccgtgcgctgaccgtgcagcacgtcgtaagcaaagaaaagaggaattttcaggcggcttaattccatcacctgatcctgcatggcgcggatatcctgacgggttacggtgttgaaaatcgccccaacctgaccgtctttgatcatctcgcggatcgcctctttcgggttatccgggccgacgctgattaagcgcagctgaccaattttctcatcaactgtcattttcttaagcagttcggtgacgaacgcatcccgcgcttcgggcgttaatggatggttgccgaataaatcatccgccagtgctggctgcagggccagactcaccgcgattcctacactacatagccatttcatatggatttttcttcctttgttgcccgacgtggcagcgaaaatggtgcaaaaaccgtagtttgccataagcatgatggagagagaaaaagaatgctcagtttattgtctgaattttcaaaatattcactcgctgaattgttatacaaggcgctattctagtttgtgatattttttcgccaccacaaggagtggaaaatgtcttccatgacaacaactgataataaagcctttttgaatgaacttgctcgtctggtgggttctagtcacctgctcaccgatcccgcaaaaacggcccgctatcgcaagggcttccgttctggtcagggcgacgcgctggctgtcgttttccctggcagtctactagaattgtggcgggtgctgaaagcctgcgtcaccgccgacaaaattattctgatgcaggccgccaatacaggcctgaccgaaggaagcacgccaaacggtaacgattatgatcgcgatgtcgttatcatcagcaccctgcgtctcgacaagctgcacgttcttggcaagggcgaacaggtgctggcctatccgggcaccacgctctatagcctggaaaaagccctcaaaccgctgggacgcgaaccgcacagtgtgattggaagtagctgtataggcgcaagcgtcatcggcggtatttgtaacaactccggcggcagcctggtgcaacgtggcccggcgtataccgaaatgagcttattcgcgcgtataaatgaagacggcaaactgacgctggtgaaccatctggggattgatctgggcgaaacgccggagcagatccttagcaagctggatgatgatcgcatcaaagatgacgatgtgcgtcacgatggtcgtcacgcccacgattatgactatgtccaccgcgttcgtgatattgaagccgacacgcccgcacgttataacgccgatcctgatcggttatttgaatcttctggttgcgccgggaagctggcggtctttgcagtacgtcttgataccttcgaagcggaaaaaaatcagcaggtgttttatatcggcaccaaccagccggaagtgctgaccgaaatccgccgtcatattctggctaacttcgaaaatctgccggttgccggggaatatatgcaccgggatatctacgatattgcggaaaaatacggcaaagacaccttcctgatgattgataagttaggcaccgacaagatgccgttcttctttaatctcaagggacgcaccgatgcgatgctggagaaagtgaaattcttccgtccgcattttactgaccgtgcgatgcaaaaattcggtcacctgttccccagccatttaccgccgcgcatgaaaaactggcgcgataaatacgagcatcatctgctgttaaaaatggcgggcgatggcgtgggcgaagccaaaagctggctggtggattatttcaaacaggccgaaggcgatttctttgtctgtacgccggaggaaggcagcaaagcgtttttacaccgtttcgccgctgcgggcgcagcaattcgttatcaggcggtgcattccgatgaagtcgaagacattctggcgttggatatcgctctgcggcgtaacgacaccgagtggtatgagcatttaccgccggagatcgacagccagctggtgcacaagctctattacggccattttatgtgctatgtcttccatcaggattacatagtgaaaaaaggcgtggatgtgcatgcgttaaaagaacagatgctggaactgctacagcagcgcggcgcgcagtaccctgccgagcataacgtcggtcatttgtataaagcaccggagacgttgcagaagttctatcgcgagaacgatccgaccaacagcatgaatccggggatcggtaaaaccagtaaacggaaaaactggcaggaagtggagtaaaaattacggatggcagagtatcgccatccgaattcacttaatcgttctgtgccgtctgccccgccgccgccatttgggcggctttttgttttttatagctcaacgctgctgccggcacaggcatcactttaccggtttcaatccaggtacgcaggcggctggcatcggcaaaatgggtatatttgccaaacgcgtccatcactaccagcgccaccggtttattattgataaccgtacgcatcaccagacaatggcccgccgcattggtaaagccggttttggttaactgaatattccagttatcgcgatacaccagatgattagtattgcggaacggcagcgtatacgtcggattagagaaggttgccatatcttcccgggtagtacttaactgcccgatcaacggatattgtttgctggcaatgagcagtttggttaagtcacgggcagtactaacgttatgcacgctcaatccggtaggttcaacaaagcgcgtgttgttcattccgaggcttttcgctttcgcattcattgccttaataaaggctttgtaaccaccgggataatggtgcgcaaggcttgccgccgcgcggttttcactagacatcagcgccagcaacagcatatctttacggctgatttcgctattcagtcgtacgcggctatagacccctttcatctccggcgtctggctgatatccacttttagtttttcatccagcggcagtcgtgcatccagcacaaccatcgcggtcattaatttgctgatagacgcaatcggacgcaccagatccgggtggttgctatagatcactttgttggtattcagatcaacaatcatcgcgctaccggaggcaatttccggttgactagcggtggtagcggctgccgttttcgcaacggcctgcggtgcaaaaggcacagccagcatcagggccaggctaaataaagaaactcgaaatttcggcatgatgagcattcagatagtggttcacgcgcacgggttgcgcaccgccggagtaaggatttactgaggctagcgacgccatcataacgagcaaaaagtgcgatcgtcaaaggagaatcgtgaggaaatgctgcattgctgacatttacgccagcaatgcaacgtcaaagaactttttagaacaaacgataaccgtagccccatagtataacggttagggcgagcagcacttccagtaccagcacgccaatcgccagcgtgctactagagaagctaaggccttcctctttgttgatattcaggaagctcggaataccaaggtaaagcaggtagccggtgtaaaacagcgccaccgtgccgaccagcgcacacaaccagaccagtggataaagcgccaccagaccgcttaaaaacagcggagttgcaacgtagcccgcgaagaccatgcagtgcgcaagactcggacgctgcggataattacgcgccatccaccagatgacccgccccatcaccgcgaccccagccagcataacgccgtaaaacaagacagccagcgccagtccggtaaaccaggataacttcaggatagtgccatcgccaaaattccagccaatctgtgtagtgccaatgaaggcgcaaatcaccggaatcgccgccatcagcaaaacgtggtgggtgtaatggtgagaaatcgtttcgttttcgcgattaatcacctgcatttcacgatcgggatgggaaaacagtccccagacatggctcataccgcccccttgttgtgagttcatgaacctgacagttcaagtataagtcagcttgtgattattttttgttcgcccatgtaattttcactgtctgatgaacgtcctttttcagcgtgaatgattcacagggtgtatgcttactggcaaccaaagggagacagactggcctatggatctcaatacacttatcagtcaatatggttatgccgcgctggtgatcggtagcctggcggaaggtgaaaccgtgactttgctgggaggcgttgcggcgcatcaggggctattaaagttcccgctggtggtactttctgtggcgcttggcggcatgattggcgaccaggtgctctatctgtgcgggcggcggtttggcggcaagctgttacgccgtttcagcaaacatcaggataaaattgagcgggcgcagaaacttatccaacgccatccgtatctgtttgtcattggtacgcgctttatgtatggctttcgggtgattggcccgacgctgattggtgccagccagctgccgccgaaaatctttctgccgctgaatattctcggcgcatttgcctgggcgttgatttttaccactattggttacgctggtggtcaggtgattgcgccgtggttgcacaatctcgaccagcatttgaagcactgggtctggttgattctggtcgtggttctggtggtgggcgtgcgctggtggctgaaacgacgcgggaagaaaaagccggatcatcaggcgtaaaaccattgccctggataaggcgttcgcgccgcatccgacatccggagtaccatgcctgatacgacgcttgtgcgtcttttcatgccgaccaaaatattacccaatgaaatatccacgcacctcactgcgttattctgggttgaactgtggattcgccaacataaagccgccatccactatcaagctctgcccggtggtgtaatttgcgccctcgctacaaagccacaccaccaggctggcaatctcatgcgttgcgccaaaacgccgcaagggaatgctaggctccgcgtcgggcttcacgtcgctgtcatccatgccattcattggcgtggcgatcgccccaggcgcgactgcgttcaccaaaatcttatgcctgaccagctccagcgccatcgctttggttaacccaccgagcgcatgtttagcggctgtgtaggcgctggcatccggcagcggcgtatgttcatgtacgctcgtaatgttgatgatgcgaccgccctgcccttgtttcaccatctgacgagccgcaatttggctgcataagaatgcaccatcgacatcaacggtaaaaatcttgcgccactcatcaaaagccatatcaagaaacggcgctttggtcattgcacccgcattattcaccagcacatcaatgcgccccagccgttgaatgagtttctccagcgccagtgccccttctggtagattgccgagatccagctgcacgatctccgcacgtacgccgtggctaactacctcacgcgcggtatcttttgccccttcttcatcactgtgccaggtaataccaatatcaaacccctgctgcgccagtaataacgcgcactctttgccgatcccgctatcggaggcggtaataatcgcaacctgtgccatcgagttctccacttaacgctgaataaacgttaagtatagaaggcgcatatcatcagcgtttgtaccccccgcccaacgcaccagtgagttgaatggaggcatccagccactgcccttgcaataacaggccattggcccgctcacgcagcgcggggattctggcttcgctgacgcgggaaccagcaatgatgcccgcgttaaagcgcgcctgcgcaagacctaccacacgcaaggcatcgcgctcaatttgcgcctgatgctggtttttctccgccagtgtctgaacctgactggctgcccgcgccacgtcattcaccgcttcaaccaccgctttgttgtagctggcgatagacaagttgctttcggcttttgcgatatcgagattggcgttaagacgaccactatcgaaaatgggtagcgtcaggcctgccgtaacgcccatttgctgcgcggaatgacggaacagatcgcttaagtgcaacgcatcctgttgcaggaaggccatcaggttgatgtcaggataaaatgccgcttttgccgcatcaatggtgcttaggctactctcaacgtaccagtgcgccgcctgcaaatctgcccgccgggccagtaaggagtaccccagttcatcaggaagctggcttgccactttcggcaacgcgaccggtttaagcttcaaactctttgtctggttatttgtaagtgcgcttaaccgtgcctcaataattttcattttccccgcgacatcgttgagctgctgccgggttttgctggcattaatatcggtttccacaccttcaacactagaagtaatcccgttctgatatagctggcgatcggtcgcgataatggtgttctgctctttttctatttgctgcaagaccgtgtttaacgccgcctgggtttgccactcccagtacaggcgggctacgctgccagccagcaattggcgggtttgctcgcgttccgccgcccgtgctttaaccgtacccaggcgggcagtaacctccgcccgattctttccccagatatcgagatgccagcccgccgttaagccaaaagtaccgttggtgtaccacgggccggtcgtacctgcggccggatcgttcagagcaaacggccccattaagccttctgcgctcattttttgccgctccatatccgccgaaaagtcgatctgcggaccatcctgagtggcaactgccttcgcctgggcttcagctagctgaatgcgctgttcagccacctgcatatccggtgcgttctgtagtgcattgttaattaaggaagactgttgattatcgtgatactccagccaccattggctgtctggccaaccattttcagcgccgtgggtaatgcggtgtcaacttgtgcagcgggcgtttgctggcttaacgcctggcgggtttcatgcataggcgcacacccggccagcatcagtaacagcggaaaacaggcgatggctggataaaaggaatcacgattcatgggggaataatcaggtaagaaaaggtgcgcggagattaccgtgtgttgcgatatattttttagtttcgcgtggcaatacatcagtggcaataaaacgacatatccagaaaaatatacactaagtgaatgatatcttccgatttatcttaatcgtttatggataacggcaaagggcttcgttttttcctatacttattcagcactcacaaataaaggaacgccaatgaaaattatactctgggctgtattgattattttcctgattgggctactggtggtgactggcgtatttaagatgatattttaaaattaattaatgtcatcaggtccgaaaataacgagaatatttcagtctctcatcctgttgcgctcctgtcatgtgcattgcttcatataatcactggcgcaaggagcgcgcagggggcggccaatcgccgccgccccctgcacccccgggctctggcgaacaaaatcgccgctgcgcggtgccctcggcttatcccttacggctaccgggtcgggcgcgaggtaacatccctgtaaaacgcgccctcagcccacatccatgtgggctgccccggccttcagggaacgcctcggcaattttgacgccaccaaacaaccgtgcggcctattgataaagagctaacacattgtcaaaaaacatcactatggttttttagagtttctcgatatcaattgcctgaatagcccttgcaatatcaggggaattattcaacacccgaacatgctgaaataattccgttgcttcatcgtattctttacgcaaataactcaaccactgtttaatccgcgcaacgtgatataacccggtatcgccctgcttttccagacgggtatatttttgcagcaaagcaaccacctccggccacggcattcgcggttcgttatattttaccacccggctcaggttgggaatattgagcgccccgcgaccaatcatcactgcgtcgcagccgctgatcgccatgcattgttgcgcgctctgccagtcccagatttcaccgttggcaatcaccggaatattcagccgctggcgaatatcgccaatcgcctgccagtcaatatgctccgcgcggtaaccctgctctttcgtccgcccatgcaccaccagctccgtagcgccagcctgttgaaccgcatcggcgatttcaaatttcttctcaccgctgtcccagcccagacgcactttcacgctgacgggcaaatgcgccggtacagcttcacgcatcgcttttgcaccctggtagatgagttcaggatctttgagtaacgtcgccccgccgccgctaccgttaaccgttttgctcgggcagccgcaattgagatccacgccccaggaacctaactccaccgcacgggcggcgttctctgccagccattgtgggaactgacctaacaactgcacgcgcaccagcgtaccagatggtgtccggctggcgttttgtagctcagggcaaatgcgatgaaagacttttaccggcagcagttgatccaccacgcggacaaactcggtgatgcacagatcgtagtcgttaacttcggtcagcaattcacgcaccagagagtcaagcactccctccatcggtgccagtaacacacgcatatcatcacccgcaaaaaaatgaggcgctatgttagcgcctatggtcagcggattaaaggtctgcaaagagggattgctgcaaactgcaatccctctctatgcttgatgtatgcctgagttcgctgcgcattgcgtaatgccggggagcgaaaaaataagcgctgatttcttaatgtgatcggtagcacgttttacgaattaattgtatgatgaatccatctcatctggggtgttgattatgagtaagacactgaacattatctggcaatatttacgcgctttcgtcctgatttatgcctgcctgtatgcaggcattttcattgcttccctgctaccggtaaccattccgggcagcatcatcgggatgctgatcctgtttgtcctgctggccttgcaaattcttccggcaaaatgggtcaatccggggtgctacgtactgattcgctatatggcgctattgtttgtgccgattagcgtaggcgtcatgcaatattttgatttgctccgcgcacagtttggcccggtagtggtttcctgtgcagtcagtacgctggtggtttttctggtggtgagctggagtagccaactggtacacggtgaacgtaaagtcgtaggtcagaaaggaagtgaagaatgatggcgaatatctggtggagtttaccgctgacattgattgtcttttttgccgcccgcaaactggcggcacggtataagtttcccttgcttaacccgttgctggtagcaatggtggtgatcattccttttttaatgctgactggcatctcttacgacagctactttaaaggtagcgaagtgctaaacgatctgctgcaaccggcggtcgtcgcgctggcctatcctttatatgagcagctacaccagatccgcgcgcgctggaaaagcatcatcaccatctgttttatcggcagcgtggttgcgatggtgacggggacttccgtggcattgttgatgggcgctagtccggaaatcgccgcgagtatcctgccgaaaagtgtcaccacgcctattgcaatggcggttggcggcagtattggcggtattccggcaatcagcgcagtttgcgtgattttcgtcggcatcctcggcgcggtatttggccatacattgcttaatgcgatgcgtattcgtaccaaagctgcgcgcggtctggcaatggggactgccagccacgccctcggtacggcgcgctgcgccgagctggattatcaggaaggtgcatttagtagcctagcgctggtgttatgcgggataattactagcctgatcgcaccgttccttttcccgattattctggcagtaatgggctaaaatttgcgatgcgtcgcgcatttttgatgtatgtttcacgcgttgcataattaatgagattcagatcacatataaagccacaacgggttcgtaaactgttatcccattacatgattatgaggcaacgccatgcatccacgttttcaaaccgcttttgcccaacttgcggataacttgcaatctgcactggaacctattctggcagacaagtacttccccgctttgttgaccggggagcaagtcagtagcctgaagagcgcaacggggctggacgaagacgcgctggcattcgcactacttccgctggcggcggcctgtgcgcgtacgccattgagcaattttaatgttggcgcaattgcgcgcggtgtgagcggaacctggtatttcggtgccaatatggaatttattggtgcgacaatgcagcaaaccgttcatgccgaacaaagcgcgatcagccacgcctggttgagtggtgaaaaagcgcttgcagccatcaccgttaactacacgccttgtggtcactgccgtcagtttatgaatgaactgaacagcggtctggatctgcgtattcatctgccgggccgcgaggcacacgcgctgcgtgactatctgccagatgcctttgggccgaaagatctggagattaaaacgctgctgatggacgaacaggatcacggctatgcgctgacgggtgatgcgctttctcaggcagcgattgcggcggcaaaccgtagccacatgccttacagtaagagcccaagcggtgtcgcgctggaatgtaaagacggtcgtattttcagtggcagctacgctgaaaacgccgcattcaacccgactctgccaccgttgcagggagcgttaattctgttgaatctcaagggttatgattacccggatatccagcgcgcggttctggcagaaaaagccgatgcgccgttgattcagtgggatgccacctccgcaacgctgaaagctctcggctgtcacagtatcgaccgagtgcttctcgcttaagcctggtgccggatgcggcgtgaacgccttgtccggcttgccagccctctcctggtgtcgaaattcccggcaaacagtttgccgtttcttgcgcaaaaccagcgggtaaagtagcctgatggaaattttccttagatcgagtctcctgcatgttaaagcgcgtgttcctcagcctgttagtcctgatcggcttgctgctgttgactgtgctcggcctcgatcgctggatgagctggaaaaccgcgccttatatctacgacgaattgcaggatctcccctaccgccaggtcggtgtggtgctcggaacagcaaaatattatcgtactggcgtaattaatcagtattatcgctaccgcattcaaggagcgattaatgcctataacagcggtaaggtaaattatctattactgagcggcgataacgcattgcaaagttataatgagccgatgaccatgcgcaaagatttaatcgctgctggtgtcgacccaagtgatattgttctcgattacgcaggctttcgtacgctggattccatcgtgcgtacacgcaaagttttcgatactaatgatttcattattatcacccaacgtttccactgtgagcgagcattatttattgcgctgcatatggggattcaggctcagtgttatgccgtaccgagtccgaaagatatgctgagtgtacgtattcgtgaatttgccgcccgtttcggtgcgctggctgacctttatatttttaaacgtgaaccgcgttttttagggccgctggtccctattccggctatgcaccaggtaccggaagatgcgcaggggtatcccgccgtcacacccgaacagttacttgaattacaaaagaaacaaggaaagtaattatggatgtacagcagttttttgtcgttgccgtttttttccttatcccgatattttgtttccgcgaagcatggaaaggctggcgcgcaggcgcgattgataaacgggttaaaaatgcaccggaaccggtgtatgtctggcgagcaaaaaatcccggactctttttcgcttatatggtggcatatatcggcttcggaattttatctatcggcatgattgtttatcttattttctatcgttaatattcccctctccagttaattattgagaataattattacttcacctgataagctgcggatatcacattcctaaccgcagctatttgtgaatcttttcacagtttaaattcccccgcacgcttagccttaatatcagtacattattatttactaaacgctcgccttaattacctatagcattaaggaagatcacatgccgcaacaaaattatctggatgaactcactccggcttttacgtctttactggcgattaaagaagcctctcgctgtttattatgtcacgacgctccctgtagtcaggcttgcccggcacagaccgatccggggaaatttattcgcagtatctactttcgtaattttaaaggcgctgccgagacaattcgcgaaaataatgccctcggtgccgtttgtgccagagtgtgcccgacggagaaattatgccaaagcggttgtacccgtgccggtgttgatgctcccattgatatcggccgcttacagcgttttgttactgattttgaacaacaaaccggaatggaaatttatcagcccggtactaaaacgctcggcaaagtcgcgattattggcgcaggtcctgccggattgcaggccagtgtgacactgacaaaccagggttatgacgtcacgatttatgagaaagaagcgcaccccggtggctggttgcgtaacggtattccgcaattccggttaccgcaaagtgtgctggatgcagagatcgcccgtattgaaaaaatgggcgtgaccattaagtgcaacaacgaagtcggtaacacactcacccttgagcagctgaaagcagaaaaccgcgcggtactggtcaccgtggggttaagtagcggttccgggctaccgctgtttgagcatagtgacgttgagattgccgtcgacttcttgcaacgtgcacgacaggcgcaaggcgatatcagcattccacaaagcgcattaattatcggcggcggtgatgtcgcgatggacgtagccagcacgctgaaagttctcggctgtcaggcggtaacttgcgtagcgcgtgaagagttagatgagtttccggcaagcgaaaaagagtttaccagcgcccgggagctgggcgttagcatcatcgatggattcacgccagtagccgtggaaggcaataaagtcacgtttaagcatgtacggttaagcggcgaactgacgatggcggcagataaaattattctcgccgtcggtcagcatgccagactagatgcctttgcggagttagagccgcagcgtaacaccatcaaaacacaaaattaccagacccgcgacccgcaagtctttgctgctggcgatattgttgagggtgacaaaaccgtggtctatgccgtgaaaaccgggaaagaagccgccgaggcgattcatcactatttagagggagcttgcagttgttaaattaatatttagagggagcttgctcatgttaacgaaagatcttagcattactttttgcggcgtgaagtttcccaacccgttctgcctctcttctagcccggtaggcaactgctatgagatgtgtgccaaagcctacgacacaggttggggcggtgtggtgtttaaaacgatcggcttttttatcgccaacgaagtcagcccgcgttttgatcatctggtgaaagaagataccggttttatcggcttcaaaaatatggagcagattgctgaacatccgttggaagagaatctggccgccctgcgtcggctgaaggaagattacccggacaaagtattgatcgctagcatcatgggggaaaatgagcagcaatgggaggagctggcgcgcctggtgcaagaagctggcgcggatatgatcgagtgtaacttctcctgtccgcaaatgacttctcatgcgatgggtagcgatgtcgggcaaagcccggagctggtagaaaaatattgtcgggcagtgaaacggggttccacgctgccaatgctggcgaagatgacgccgaatatcggtgatatgtgcgaagtggcgctggcggcgaagcgcggcggcgcagatggcattgcggcgattaacaccgttaaatccatcaccaatatcgatcttaatcagaaaatcggtatgccgatcgttaacggaaaaagcagtatttccggatattccggtaaagcggtaaaaccgatcgccctgcgcttcattcagcaaatgcgcacccatccagaactgcgcgatttcccaatcagcggtatcggcggcattgaaacctgggaggatgcggctgagtttttattgctcggcgcagcaacgttacaggtgaccaccggcatcatgcagtacgggtatcggatagtggaagatatggcaagcgggttgagccattatctcgccgatcagggatttgatagcctgcaggagatggtaggtctggcgaataacaatattgtcccggcggaagatttagaccgcagttatattgtctatccccgtatcaatcttgataaatgtgttggctgtggacgctgttatatttcctgttacgacggcggtcaccaggcgatggaatggagcgagaaaacccgcacaccgcattgtaataccgagaaatgtgtgggttgtctgctttgtggtcacgtctgcccggtgggttgtattgagctcggggaagtgaagtttaagaaaggcgagaaagaacacccggtaacgttgtaaaaccagagacgcatccggcatttggttcctgtcgccggatgcggcttgaacgccttatccggcctacaaaaccatacaaatcagtatgttgagcttattgtaggccggataaaacgcgccagcgttgcatccggcatttggctcctgttgccggatgcggcgtgaacgccttatccggcctacaaaaccacacagatcatgatgttatgtgcgtttatgaccgaatgcggaccacattcacatcatttcttacgcgcgtatttcagactatccagcgctacggcgaagataataatcgcccctttgatgatgtactgccagtatgggtttacgccgatatacgtcaggccatagttgatgacggtaaaaataattaccccggtcaccacgccaatcaccgtccccacaccgccgctgaagcttacaccgcctaccacgcacgccgcgatagcatccagctcatacataaagccgaggttgttggtggcagagccgatacgtccggcttctaacatcccgccaaaggcatagaacacgccagacaacgcgtagatcatcagcaggttcaggccgacgttgacaccagatacttttgccgcttccgggttaccgccaatggcaaaaatgttcttaccgaagcgggttttgttccacaacacccagacgaacgccaccgcaatcaacgcgtagaaggtgatgtaagagagacggaaactccccagcgcgacaaagccctgagcaaaggtagagaagccactgtcaaaaccagaaattgggctcgccccgacaaagtcgtaatagaggctgttgatgccatagacgatgatcatcgtgccgagcgtggtaatgaacggcgtcacgttgagataagcgataatcagaccgttgatcaaaccgatcaccgcaccaatggcacagacaatcagaataaccagcgcaatcggcatcgtcgccatttccgggaacactttgttggcgttatccatggactgcaataatgtcgcagccaccactgccgccagccctacctgacgaccagcagaaagatcggtcccctgggtgacaattaaccctgccacaccgagcgcgataataatacgcacgctactctgggtgagaatattacttaagttcaacagacttaaaaatgttgggtcctggaaaataataatcgccagcaaaactaaaagaacgacgtaaataccgccctctttcaggtaagtaagaaaacttttcttatttaacgcactcatgggaagcccctaatcttaaaggtgcaaagacgcaagacgcagaatttcgttttgcgttgttgtttttgtatcgacaattccggaaacgagaccattgctcatgaccagaatacggtctgttatccctaacaactcaggcatttcagaggagataataataatccccttgcctttcttcgccagttcggcaattaactgataaatttcaaacttcgccccgacatcaataccgcgcgtcggttcatcgagcattaatatttctggttgcgttagtagccagcgaccaataatcaccttttgctgattaccaccggagaggctaccaatttgcgtccgatgacccggcgtttttacccgcatgctatcaatcacccactgggtatcgcttttcatccggctgttatccagtaaaccaactttatttttgtagttgcgaatattggaaattaagctgttaaaaccaatatccagataggcataaattcccgtactgcggcgctcctcagttaccagtgcaaatccatggtttatggcttcgttggcattatggttattgatctgtttgccgtgcaacgttatggtgccagcgcttttctcgcgaataccaaataacgtctcaacaatatcggtacgtttcgcccccaccagaccggcaataccgaggatctcccctttatgcagatcaaagctgacatcgcgaatgctcggctggcgcagactcgtcaggttacgtacctcgaggatgacttcgcccggtttgttttctttgtcagggaaacgctggttaagagaacgcccaaccatcatggcgatgatcttgtccatcgtcagtcctgccagcggttcggtggcgatccactgaccgtcgcgcaatacggtaacttcatcacataactggaagatttcttccattttatggctgatataaacaataccgcagccgcgctcttttaatttacgaataatagtgaacagatgattgacctctttttcggttaagctagaagtcggttcatccataatcacaattttcgcgttataggaaaacgctttggcgatttcgatcatctgcatttggctaacggataatgtgccgacgcgcgcacgcggatcgatatcaatatccagttcgtcaaaaatcgctttggtttcgcggtacattttgtcctgatcgacaaacatgcctttggtgggatatcgccccagccacatgttatccatcacgctacgttgtaataccaggtttaactcctggtgtaccatgctaataccattttccagggcttcttttgcagaatggaaatcgatctctttaccctggaataaaatggtgccggagtctttttgataaataccaaacaggcattttaataatgtgctttttcctgcaccgttttcccccattaatgcatggatagaatgtggccggacttttaaattaacgttatcaagtgccttaacaccaggaaaggacttgttgataccgctcatttccaacaagtattccccggaggacggagtcgtactgctgaccatataattttaccttgttggccatacaataagggcgcagtaatagactgcgcccaatcagtcttatttcttgctgaattcagccaggttgtctttatctacgccaacataaggtacgcggaccactttgttgtcgattttccagttggtgccatcagccgcacctttaccatcggccaggtttttcgccagatcaaaggtcgctttcgcctggttgttagcatcgttcagtacggtgcccgccagtgcaccggatttcaccagcgccagcgcttctggcagcgcatcgacgccaaacaccggaatgctggacttgttgtgtgctttcagcgcttcaaccgcgcccattgccatcgcatcgttgttggcgataaccacttcgattttgttggcgttcgggccagacagccaggcgtccatcttatctttcgcctgagcggtgtcccacattgcggtatctaactgtaactgttcagttttgatgcctttatcgttcaattctttaatcacgtaagtggtacgtgcttctgcatccggatggcccggttcacctttcagcagtacgaactgaatctgaccgtctttgttcagatcccaaccctgattcgccgcccagtgtttagcaatcaaatcgccttgaataatgccggactctttggagtcagtgccaacgtagtaggctttgtcgtagctatccagcgccttacgagacggttctttgttgaagaaaaccaccggcacgttttgcccacgcgctttctcaatcaccgtacccgcagctgccgggtcaaccaggttgattgccagtgccttcacccctttcgccagcaatacgtcgatctgatcgttctgcttggactggtcattctgagaatcattcatcagcagctgaacatctggcgcggctttcgcatcttgctcaatagccttgcgcactacagacataaagttatcgtcgtacttatagattgttacaccaatgcgagtatcagcagcgtgtgcagcggcaccgaataacatgctggccatcacagcagacagggttaacaccttcttattcatggtatctccggtttttcttatgcagggtagtgcttgagataaatgctcggcggggcagtagagttaatgaagtgttactgaacgccgaagctcactttttaaaattcgttcttccatgcccggtaacgctccagaaaacggctttaattgttgttatgacgctgttacctcggcaaaagtgattattcactgttacatacgggttacaacgttaaaacggtgcaatcatagctatcacattgttaagatactgtgaaatcactcacagattgaaagcggttacatcgcctgatttgtactgttagtgatcgccgccgcattctggcgtgttgcgacagaatggcgacgcactaacgtcggcataaaacagtggctggcacgaggatcaatattgcctgctgccccctgcaaggccagttcggtggctaatttcgccatactagcaatgggataacgcacggtcgttaattgcgggtcggtgtaacgggcgatgggaatatcatcgaaaccgatgatactgagatgtaacggaatcgcaatgccattatcttttaatgctgtcagtgcgccagcggccatattgtcgttataagcaaatacagcggtaagttgtagattgcgccccagcagttcaaccatcgccgcctcaccgcccggcatgtccggcgtaccagcgccaatccagctttccggcggaataatatcctgctctttcaacgcactcatccagcctgctttacgcatggcgtcatcttcaatgccgtggctggaagaaagataaccaatacgttgatgaccgttattcagcaacatgcgcgtcgccattcgggcaccgctgagattatccaggcaaacgcaacgatgggcgtaccccggcacaacgcggttgattaacaccataccgggaatgttatccataaattgcgccagttcatcgtcactcaatgctttactgtgaacaatcaacgcattacaacgctggcgaattaacacctcaatggcgtgacgctctttttccgcttcatgatagctattgccgattagcacgtatttctgatgctgctgagcgaccagatccaccgcttttaccagcgcgccgaaaaacgcatcagaaacgtccatcaccaccacgccaatggtgtcgctaacctgagttgccagcgcctgggcattggcgtttggccgataatccagctcactcacggctttcattactgcttcacgcgtgtcggcactgaccagcgtgctgttattgagcacccgggaaaccgttgccacagagacgccagcctgacgcgctacatcacgaatggtgatcatattcactacctgttatgagattgcagtaaatgactgcttgctggcggctattttgtcagcactgaatacaggacttcgtgaatcgagtcacagcaatggaaacggttacagccgttttgttaacgaatgtgatccagatcgttatctacttgttttagatattgccggtccggcagcacgcaaagttaactgacgccagagccattccaccggcccctggcggaagtaacgcagccagataacagagaagaggatattcgccagccataccggaataacaaacgccagcagctccaggcggtcaaaatgcataaacaaaccgaggtggtaaaaaagcgtggtacaaatcagcgtttgcaatagatagttggtcagcgccatccgtccgacgcaggcgatcgcaagcaccagcttaaagcggctcaattgcggccagaagccataaaacaggctcgcatagccaatcgcctgaaacggcgcactcagttcccgcggcatttgaagtaagaaggcacaccagcgatacgcccagtccagctgccattgcagggcgatggcaggaaggttaatggtcaccccaatcgccaccagcacaaaaccagtacgacgatagtgacgtaagctgaactgccctttcagccagccgctgcgcatcagcgccgcaccaatgagcatcatccctgccagttgccagccatactgtgcgcccagtgccagtaaactgttgccaacaccatcggcacgattactgatcgcttcaacgccgccgtgaagcttccagtatttttcatacaaaatagcgcttgcatccggcgtccaggcgcggctggtctggctgtcggaaatcagccccaataacagcaaaacgccaagccccaccagataaagcatgacgcctgtattaaacaggctttttacgcttggcgcatcgcgcaccagccgccagcagattaagcccaccagcccgtaagccagcaaaatatcgccgtcccagaacaataaaccgtgaataaagcccaacaagactaacagcgttaaccggctctggatccagcgtctgccacggggcagcaacatttgcaggcccgcaccaaacagtagcgcaaaaagcgtgaggaatttcacctggccgatgagatcaagaaatgcccaagtccatgcatcccgcggcgtaatagcaccgtaccaggcgggattgagataagccgcctttggtagcccaaaggcgctgatgtttaatagcaggatccccagaatggcgacgccgcgaacaaaatcgagcgtgacgttgcgctccatggttcctgccttttaatcagttgtgatgacgcacagcgcgcagaaactcgtggcgcgtattctgactggatttgaacaatccaccaagagaggtcgttgtcgtggcactggttgcatcgcggatgccacgcgccttcacgcagtaatgcaccgcgtcgatgctgacagccacgttattggtgcccagcagcgtttgtagcgcaataagaatttgctgcgtcagacgttcctgcacctgcggacgctgggcaaagaactgcacaatgcggttaattttactcagaccgatcacgctatctttcgggatataggccaccgtcgctttgccatcgatggtaacaaaatggtgttcacaggtgctggtcagagtgatatcgcgcacggtgaccatttcatcgaccttcattttgttttcaatgagggtgattttcgggaaattggcgtaatccagaccggagaaaatttcatcgacatacattttagcgatgcgatgcggcgtttccatcaaactgtcatcagccaggtcgagattcagcagctgcatgatttcggtcatatgaccagcaataaggcttttgcgcgtttcgttatccatttcatgcacgggcgggcgcagcggtgtttccagtcctcgcgcaactaacgcttcatgaaccagggccgcttctttactgagacttggcatttatgatttctcctgcaggtgtgacgcctccgccctgcgtgggggcaaagttattaagctgatttacagcctgattattgtgcgtgaggcggcgcacataatccagtattcacagcgataattattgtaattgccgctgcctttcatcagcagatgttaaaacatcgttatgcaaatacggaagtgaaagttactcacagcacattgaataaacggtatgatgaagaaattgcaaacaacacaacaaggagccacgcatggaaatgctcgaagagcaccgctgttttgaaggctggcagcaacgctggcgacacgactccagtaccttaaactgcccgatgacgttcagtatctttctccctccacctcgtgatcacactccgccaccagtgctgtactggctttccggattaacctgcaatgacgagaacttcaccaccaaggcgggtgcccagcgggtagcggcggaactggggattgtactggtgatgccagacaccagcccgcgcggcgaaaaggttgccaacgacgatggctacgatttaggccagggcgcaggcttttatcttaatgccacgcaaccgccgtgggcgacgcattaccggatgtatgattatctgcgcgatgaattaccggcgctggttcagagccaatttaatgtcagcgaccgctgcgccattagcggtcacagtatgggtggtcacggtgcgctgattatggcgctgaaaaatccgggtaaatacaccagcgttagcgcctttgcgccaattgtgaatccgtgcagcgtcccgtggggaatcaaagcgtttagcagctatttaggtgaggacaaaaatgcatggctggaatgggacagttgcgcactgatgtatgccagtaacgcgcaggatgcgatcccgacgcttatcgatcagggcgataatgatcagtttcttgccgaccagttgcaacctgcggtactggcagaagccgcgcgccagaaagcgtggccgatgacgctgcgtattcagccgggatatgatcacagttactacttcatcgcctcttttatagaggatcacctgcgcttccatgcgcagtatttactgaagtgaaagtccgcccggttcgccgggcatcttctcatcagaagcgataatccactgccataaagtaacgacgtccgtcttcgttatagctgtagtcgtcacgactgagatccttgtcgccaaggttcagcacgcctgcgcgcagtttgacgtctttagtcacctgccaggccgcgccggtattccagatggtataaccgcccggtgttttagccgtcgcgctgtcggcgcgtttctgcccggtatagtgcccagaaacatagaaactccagtcttccagcgccagcggtttccagtccagcgtaccgttagcagtatggaacggcagatcggatagcggtttgttttcgccgttgctgacatcacgaccatcgttgtaggtgtagttgatgctcagtttccattcatcgttgaacggaattttcagttcggtttccacgccctgaatacgagctttgttaacgttgtagtagctaaataccggtatgcgccgtccgttagcgcccgtctcaaaaccaacaaagttttggtagcccggtgcagcgttgacgtcagacgtacggctgatgctgatacgatctttcacatcgttacggaaaacggtaacgctggattcaaccccttccagccagccttcttcacccatgtagtaaagccccagctcccaactttcgctggtttctggtttcagatccgggctacccacaatcttacatgcgccacggcaggaattgctcgtccagtcagggctaagttgcaacagagaaggtgctttaaatgccgtcgcccagccccctttcaccgttacggtgtcggtggcgttataaaccaggtaggcacgcggactccagtgttcaccgtaggtttcgtgatcgtccatacgcacgccggtcgtcagcgccagcggctcgaagatccgccattcatcttccacaaacagcgcgtactggctggcagacgttttggagctggttcccccggtcaggttcaccgcatcgctaagtttgtcgtgacgccattcaccgccaaccgtgagaaactgattaatcgccgtcagcggcaacgtgtatttgccgtcgaccgtattgctttcggaagttatcgggctgctgttgccagggtttttgttctcgactttctcaccgtagtatttcagttcgctggtgccgtaatcccaacgcccattatggctgacggagtagttctggcgttccaggcggtttttgtccaggctgtcggaatcacgatcctgacggtcgaaaccgtatccggcagtaaaatcgtgattttgattcggtgtccaggcaaattcgacattgccgtcgcggctggagaatccttcaatacgcggcgtttctccggtatcggtggtcgtactgttttgcgggtcatccttttcacgttttgccaggctgccgtaagctttcattcccagcacaccatcaattaatggtccactggtaaagaactgaccgttataggtgtcaccgcgatcgcgatgttcctgaatggtggtatcgacggtaacggtaccgctccatttctgaccgatttttttggtgatgatattcactacaccgccgagcgcatcggaaccgtacaggctgctcatcgggccacggaccacttcaatacgttcgatggaatcgaccgggatccagttcagatcgaaatcattgtggcggaagacggcattgcgggagttcacgcgtttaccgtcgacgagaatcagggtatagctgctgtccagaccacgaatactaacgcccttacggttatccccttcgttcgtcagttgtacgccaggcacttctttgaggacatccttcagattctgtaccggttttcgctgcaggtcttcctgggtaatgacgctgatactggcaggtgcatctttaagattttgttccacggaagatgcagtgacaaccatcgtttcgccatcatcatcgaccgctaacacaggccatgcacaagaaatagcggacaaacacagcccgacccgtacgaaagggttcaacctaaacattccatatctccatgaggtaactacgaaaataaaatgggttatcgctcacatcttcttcacgtccccttgcgtacggcagcatcgcggtggacttattttttatgcaggtgatcatcccagaaagccggaacagcctctgatttgtcagccttttttgattgcggcgtaacgataatgcaaacgataacaattatcaatccaaatgttaaattttatatccgcatgatttgtcagggaaatggaattgaaaaagccctctcggttgagagggcttagcaaggaagggaggaaacttatttcttatcgttctgcgggaacttcatttcgctgtagcgtacgaagtgagttcctttaatcagcttgtagccgaaccaaataatcaggaacagcgggataccaatatacgttgccgctacgccgccccagtcaatagtatctttcaggaacgcttcgtagttctggcccaaagtgataatcagacacagaatgaatgcgaagatcggccccagtgggaagaaaccactacggtacggcagatcgttaatgtcgtgtccctgcaatacgtaaccgcgacggaagcgatagtggctaatggcaatccccagccaggcgataaaacccgtcatcccggaggtgttcagcagccacaggtataccgtctggttgccaaacatggaggtcaggaagcacagaccggcaatcaccgtcgtcgcatacagcgcattacgcggcacgccaccacggctcagtttagcgaaaatgcgcggcgctttaccgtcacacgccagggtgtacagcatacgagtagacgcatacataccggagttacccgcactcagcaccgccgtcagaataactgcgttcatcaccgccgccgcagagagcagacccgcgtgctggaacaccagggtgaacggactaacgctgatgtctttaacatcgttacgcagcaggctcggatcggtgtacggaataatcaggctgataatcaggatcgcgaacacatagaacaacaggattcgccagaacacctgacgtaccgcgcgtggaatgtttttcgccggatcttcggactcgcctgcagcaataccgatcagctcggttccctggaaagagaagccgacaatcatagctacgccgatcatcgccgcaaaaccaccagcaaacggcgcttcgccgattgtccagttgctccagcccgcaggctgcgcgcctttgaagataccgataatcatcagcacgccaacgatgataaagacaataactgtcgtgactttgatcagactgaaccagtattccgcttcaccaaagccacgaacactgatgtagttcagcaggaagataacgccgaggaacaacgcactccagatccagcccggtgtatccgggaaccaccagctcatgaccagctgagctgcaaccaggtcaacggcgatagtcaccgcccagttgtaccagtagttccagcccagcgcgaagccaaagccttcttcaacatagttctgaccgtaagtggcaaagctaccggaaaccggcatatatgcagccagttcaccgagactggtcatcaggaagtaaaccatcaggccaatcagcatatagctgagcaatgccccgcccggacctgcctgagaaatcgttgcgccagaggcaacaaaaagacctgtaccgatggaaccgccaatggcaatcatcgtcaggtgacgcgcctttaattcacggcgtaagcccggcgcttctgtggttttagtttcggaaaccatacaaaaatgctatccatcttaaaaatgaggcgcgattgtagcagacgattggcaatccttccggcagaaatacacggttataagacaccttcatgatcgcccagggattataagtaaagcagccaatctcttttctggcgaatgcatgctgaaggcgctgcgtcacgaaatcgacacagcaccagcatgttcttgtacagcaacttaacgcggcacatttgcgggatcgcaatagtccagaaagcgccgtagcgcgttggaaaggtgtttttgccgatgatgtatacgccacaacgtacgcatcaggcgcggcagagggaccgcaacttcacttaatgtgcctgcctgcaattgatcttcaatcacacgtcggctcaggcaactaattcccaacccatgacgcaccgcatgtttgattgcctcggagttacctaattccatcgccatctcaaacttcggtaaatgactcagcaacagataatcgacaatctcccgcgtgccggaaccgcgttcacgcaggatccacggcgcagcggccagctgttctaaggtgaccggaccacgggccaacgggctagtcggcgcggcgaaaaccaccagctcgtcttccagccacggttcagaaatgatttcagtgctgtggcacggtccttcaataaagccaatatcaacgcggaaatccagcaccgcttgcatcacgtcctggctattcccaacgctaagttcaatcggcaactgcggataatcatggcgataacgggcgataactgcaggcagaatgtagttaccgatggtactactggcatagatacgaatcgcgccgttgtcttcgcgaaacagttgttcgatttcaaccgcctgttcaagcaatgccaacgcacgcggatagagcagccgcccgtgttcattaacaaccagtcttttccccacgcgatcaaacagttgcacgccaagctgcccttccaggtcggtcaaggctgcgctcactgcactttggctcaacgccagcatcacgctcgcctgggtggtacttccacttttcaatacttctgcaaaaacttccaactgccggagggtgatgtgcatagtcgcttaccacttataaagattaattataaatatataatcaattttatttttaaaccagttagtcgtaaccttatgcccggttaaaggagagggttatgacgaatatcaccttacagaaacaacatcgtacactgtggcattttattccggggttagccctgagtgcagttatcaccggggtcgccctgtggggtggttccattcccgcggttgcgggtgccgggtttagtgccctcaccctcgcaatcttgttggggatggttttaggcaacaccatctatccgcacatctggaaaagctgtgacggtggtgtgctgtttgccaagcaatatttattacgtctgggtatcattctttatggcttccgtctgacgttcagccaaattgccgatgtcggtatcagtgggatcatcattgacgtgttgacgctgtccagtaccttcctgctggcttgcttcctggggcagaaagtgtttggtctggataagcacaccagctggttgatcggtgccggtagcagtatctgtggtgctgccgcggtactggcgactgagccggtagtgaaagcggaagccagtaaagtaaccgtggctgttgcaaccgttgttatcttcgggaccgtcgcgattttcctctacccggcgatatatccgctgatgtctcaatggtttagtccggaaactttcggtatctacattggttctactgtgcacgaagtggcgcaggtggtggcggcaggtcatgccatcagcccggatgcggaaaacgcagcagttatttccaaaatgctgcgcgtgatgatgctggctccgttcctcatcctgctggcggcgcgtgttaaacagctgtctggggcgaacagcggcgagaaaagcaaaatcactattccgtggtttgccatcttgttcatcgtagttgccatctttaacagcttccacctgttaccgcagagcgtggtgaacatgctggtaacgctggataccttcctgctggcaatggcgatggcggcgctgggtctgaccactcacgtcagcgcgctgaaaaaagctggggcgaaacctctgctgatggcactggtactgtttgcctggctgattgttggtggtggtgcgattaactatgtgattcaaagcgtcatcgcataaaccactacatcttgctcctgttaacccgctatcattaccgttttcctccagcgggtttaacaggagtcctcgcatgaaatacattggagcgcacgttagtgctgctggcggtctggcaaatgccgcaattcgcgccgccgaaatcgacgcaaccgcgtttgccttgttcaccaaaaaccaacgtcagtggcgtgccgcaccgctcacgacgcaaaccatcgatgaattcaaagccgcctgtgaaaaatatcactacacaagcgcgcaaattcttccccacgacagttatctgattaacctcggacatccggtcactgaagctctggaaaaaagccgcgatgcctttatagatgaaatgcagcgttgcgaacagctggggctttctttgctcaacttccaccctggcagccatctgatgcagattagtgaagaggattgccttgcgcgtattgccgaatccatcaacattgcgctggataaaactcaaggtgtgacagcggtgatagaaaacaccgccggtcagggcagtaacttagggtttaaattcgaacatctcgcggcgattatcgacggcgtggaagataaatcccgcgtcggcgtctgcattgatacctgccatgctttcgctgccgggtatgatttgcgtactccagccgaatgcgagaaaacattcgcggattttgcccgtactgtcggctttaagtatctgcgcgggatgcaccttaacgatgcgaaaagcacctttggcagccgcgttgaccgccatcatagcctcggtgaaggcaatatcggtcatgatgcgttccgctggatcatgcaggacgaccgtttcgacggcattccgctgatcctcgaaaccatcaacccggatatctgggcagaagagatcgcctggctgaaagcgcaacaaactgaaaaagcggtagcctgaagatgaataaccgggaaaaggagatccttgcaattttacggcgtaacccgctgattcagcagaacgaaattgcggacatgctgcaaatcagccgtagccgcgttgcggcgcatattatggatttaatgcgcaaaggccggattaaaggcaaaggttacattctcaccgagcaggaatactgcgtagtggtggggacaatcaatatggatattcgcgggatggcggatatccgttacccgcaaagcgcttctcatcccggtacaattcattgcagtgcgggcggcgtgggacgcaacatcgcccacaatctggcgctgttaggccgtgacgtccatttgcttagtgtgattggcgatgacttttatggcgaaatgctcctggaagaaacgcgccgtgccggcgtgaatgtctccggctgcgttcgtttgcatggtcaaagcacaagcacgtatctggcaattgccaatcgagacgatcaaaccgtgctggcgattaacgatacccatctgctggaacagttgacaccgcaactactgaacgggagccgcgatttacttcgtcatgcgggcgtggtactggctgattgcaacctgacagccgaggcgctggaatgggtctttaccctcgctgatgaaatcccggtgtttgtcgataccgttagtgaattcaaagcgggcaaaatcaaacactggctggcgcatattcacaccctgaaacccactttaccggagctggaaattttatggggacaggcgatcaccagcgatgctgaccgtaataccgcagtgaatgcattgcatcagcaaggtgttcagcaactgtttgtttatttgcccgatgagagtgtttattgcagcgaaaaggatggagaacaatttttgctgaccgcgccagcgcatacgacagtagacagttttggtgctgacgatggttttatggcgggcctggtatatagctttcttgaaggatacagtttccgcgacagcgcccgttttgcggtagcctgcgcggcaattagccgcgccagcggcagcttaaacaaccctaccctgtctgccgataacgcgcttagtttagtgccaatggtgtaacaatgttgccggatgcgacgcttaacgcgtcttatccggcctacaaatcaggcaatttcagcaagtaaatgtaggcctgataagcttgcgcatcaggcaatgacactcaagctaaaccaataaagaacccggcaatggtcgcactcatcaagttggaaagcgtcgccgccgccagcgcccgtaaaccaagctgggcgatttccggcgcacggtgtggcgcaaccgcagaaaacgcccccaccaccaccccgatagaaccaaagttagcgaaaccgcacaacgcgaaggaaataatcgccacagttttagcatcgagagtgccagccgtttgcagatagggactgaaattgagataagcgacaaattcatttattgccagtttctgtccaatcaaactcccggcaagattcgcatcactccagtccacacccatcacccacgccagtggagccagcaggtaacctaaaatggactccaggctggcatgttcaaaaccaaaccagccaccaacgccgccgataataccgttaatcaacgcaattattgcaacaaatgccatcaccactgttgccacacctgcggcgattttcagcccggtcattgcccctgtcgcagcggcttcaataatgctttttggcggtgtttcggtgaaagagaggttattaaaggaaacctggctagattccgttgccgggcttaacaggcgggcaaacaagatcccgccagggatcgccattaaacttgccgccagcagatattccacaggcacgcccagtgcggcgtaaccaatcattgtgctaccagcaatgctggccatgccactacaaatcgctgtaaataattcattgcgattcagacgatcgataaagggtttgacgattgccggaatttcgttttgcccgaggaaaatggtggtgaccgcgacgaaactctcgatcttgctgatatttaatgctttctggaagataccgccgagaattcgaattaaaatccccatcacaccgatgtagtagagaatactcaccagcgcggtgacgaagataattgccggtaacaccctgaaaccaaagataaatcctgcaccatcaaataaggtatccattttcggtccgaccagagaaccgaagataaatgcgctacccgcgtcgctgtacgccatcactttatgcacgccaaaagcgactttttcagcgacccaacgccctggcggtaaccaaagcataatgccgccaatcacgacctgtaacactaacgccgcgccaacggtacgcaggctgatcttcttcttgtttacactcagtaaaaacgcaatcgtcagcaataccaccattcccagaacacttctcatgacatccatagtgattatctcttcatgtcatattgggcgacggctttctgcccatcagaaatagccaggcctgcatcttgcgataccggcccggcttgttatcaacacttaatgggttttgatgtagccgcgcacgcactcttcgactaatccccagaaccagtctgtatcaatagtgatgccgactttggtattggcgggcttgccaagaacgcccagctcgtcgcagacggtacgcccatagcaagggccactgttgacgtccacttcgacgtacatctcctgggttttaatgccatcagggttaatcagataaccgatgcaggtggcgtcgtgcaccgggccgccagcaaggccgtagttttcgaactgcgttttgagagtgaagttcatgatgtcgctgaacagctctccggcggggccgcctgccctttccatccgagcaatcacgtccggggtgcaaacggtctggttggtgagatcgaggcccatcatcactaatggaacgccggaggtgaacactacgcgtgcggcttccgggtcggcaaagatgttgaactcggcagatggcgtgaagttgcctgtaccgtaagcgccgcccattagcacaatttcacggattttgggcaggatcgcgggttgcatacgcattgccaccgcgatattactaagcggaccaaccggcaccagagtgatatcgccatcgcttgccatcagggtatcaatgatatatttcaccgcatgagtgctttctgcctggcgggtcagcggctcgaataccgggccatccagtccggtttcaccgtgaatattatcggcaacgatttgttgacgcataatgggctgcggcatccccgcataaaccggaacattaatctccagtttctggcaaacattcaggccattaattaatgttttatcaagcgtctgattacccgctacaatagtgatgcctaataaatctattgccggatgtttcgccgccatcattatagcaatagcatcatcatgacccggatcacaatccagaataatttttctcttttccattgtttatttcctctgtttccagttgcgttattttttctacagcaaagaaaattcgaccgggccgatgattgaatcttaacaacagcgtacgtatgctaaatatgagaaatctcatagcggataaacatcgtgaaagaaatccacaataatgatcttaagcagcaattgatgagtgaatccgcgtttaaggattgctttttaacggatgttagtgccgatacgcggctgtttcattttttagcgcgtgactacattgtgcaggaagggcaacagccgtcctggctgttttacctgacgcgaggccgcgccaggctttacgccacgctagctaatggtcgcgtgagcctgatcgatttctttgccgccccctgttttattggcgagattgagttaatcgataaagaccatgaaccgcgtgcggtgcaggctattgaagagtgttggtgccttgcgctccctatgaaacattaccgtccgctgttattaaacgacacgctatttttacgaaaactctgcgtcaccttaagtcataaaaattatcgtaatattgtttctttaactcagaatcaaagttttccgttagtgaatcgcctggcagcatttatattactcagccaggaaggtgatctttatcacgaaaagcatacgcaagcggcagagtatttaggcgtttcttatcgacatcttttatatgttctcgcgcagttcattcacgacggtttattaattaaaagcaagaaagggtatctcattaaaaacagaaagcagttgagtggactggcgctggagatggacccggagaataaattctccgggatgatgcagtaaaaattattttcaatagcgcgattgccggatgcaacgcttaatacgttttatccggtctacaaatcgagcattacgccagaccaataaagaacccggcaatagtcgcactcatcaggttggaaagcgttgctgctgccagcgcccgtaaaccaagctgggcgatttccggcgcgcgttttgggctaatagcgctaaatgcgccaacgacaacaccgatagaaccaaagttagcaaaaccacaaagcgcaaaggagataatcgcaatggttttcacttccagcgtgccgcccgtttgcaggtatggggagaaactcaggtaagcgacgaattcgttaatcgccagtttctgcccaatcaggctacccgcaagattggcatcactccagtccacacccatgatccacgccagcggtgccagcacatagccaaaaatactttccagagaggcattggcgaaaccaaaccagccgccaattccgccgataatgccgttgatcagcgcaataattgcgacaaacgccattaccaccgtcgccacaccagcggcgatttttagcccggtcatcgcaccgctcgccgccgcttcgataaagctttttggcggcgtttcgctgaagctcagattttcaaatgtgacctggctaggctcggttgccgggctaagaatacgtgcaaacaaaatcccgccagggatcgccatcaggcttgccgctaacaggtagtcaattggtacgcccattccggcataaccaatcatcatgctaccagcaatggacgccatcccgctacaaattgcggtaaacaactcgttgcgattcatgcgatcgataaacggtttaacgatcgccgggatctcattttgcccgaggaaaatagtagtaaccgcaacaaaagattcgattttgctgatgttgagggctttctggaaaatgctgccaaggatgcgaatcagcagccccatcacgccaatgtagtacagcagactgatgagcgcagtaacgaaaataatcgccggaagtacgcgaaaggcgaagataaaacccgcaccgtcaaacaggacatccattttcggcccaaccaggctaccaaaaatgaaggcgctaccggcatcactgtaagacatcactttatgaacgcctaatgccgcctgttctactgcccattttcccggtgggaagtagagcatgatgccaccaatagcgatttgcagcagcagtgcggctccaaccgtgcgcaaactgatgctctttttattcacactcaacagaaatgctattgccagtaacaccaccatccccacaacacttctcattatatccataatgattttcccttcatgccggtaaacccggcgtcagcgccaggttttggtatgcttgatgagtacgggcgacggctttctgcccgtcagaaattaacccgcgagacgctgatattctttggcaatttcgctcgccagaatggcgttgttgaacaccagctggatgttggatttcaggctgtcaccgccggtcagttcagcaacgcgcgccagcaggaatggcgtactttctttaccaatgactccctgagcttcagcttcagctaccgcctgatcgatcgccgcattgatagtgtgttccggcatagcaaactgttccgggatcgggttcgctaccacgaggccaccgttcagaccgctttgccatttcaccaccattgcacgggcaatttcgctggcgctgtcgagacgaatgctgacgtcaaacgggctggtgcggcagaaaaacgcaggcagcgctttagtctgatagccaattaacggcacaccgaaggtttctaaatactcagtggttaatcctaaatcgagaatagatttcgccccggcacaaacaacggtgacattagtatttgccagttcttgcaaatcggcagaaatatcgaaggtatgttccgccccgcgatgcacaccaccaattcccccggtggcaaatactttaattccggcaagcgccgcaataatcatcgtactagccacagtggttgcgccattttttccggcggcaacaacaaaaggtaaatcgcgacgactaactttggtcacgttatgcccttcacgacccagtaattcaatttcttctttgcttaaccccactttcatcacgccgccaataatggcgatcgtggcaggtacagcgccctgtttacgaatagtttcttcaacttcaattgcggtctgggcattttgtgggaacggcatcccgtgagaaataatggtgctttccagcgccacaaccggttttttgttttttaaagcgtcctgcacttccggggaaatttgtaataattcaggggaaatttttaattcagacattctgcgttctccactaagcttataacgttggcaatgcttaaatcggggttattggtgtattcacaggagagcgccatactgctacatccctgtgcgaaacgaacagattcggcaaacggcattccgtctacccaacagctagcaagtcccgccatcatggcatcgcccgctccggtaacattaataacattggttttgatcggcgcagaccagccactttcaccgctgatatcgctgtaataaacgccgtcgccgcccatgctcaataccagtcggttcaggccatgttgatggaaccaggcagcaacttttgccacatcttcacgcccactcagcgcaatcccactcagggtttccgcttcaaggcggtttggcttgagagtgtggatctgatttagacggtcgcgcactttgacacatttccatgcgctaaccggatcgacaaatacgggtacgttggcggcattatccagaatccatgccagtgcctcttcactgatattacagtccgcgacaatgacctttgccctctgaataaattcaccgtgctgtgcgagatattcagctgtaatagcgttgctaatattcatgtcatttatagcaaccagcatttcaccggtattatcgagtaaacttaaataactgctcgtattttctcccggcacaatcaggcatttatcgacataaacgccagattgattggtttgcgttagcaggctttgaccataaaaatcactgcctacggcgctcagtagccaggctttgttacccagcaacgccaggttttgtgcaatattgcgccctactccaccaggcgtaaattttattttacctggattactatccgcataatttaaactttcatgactatatccggcgacatcaatattcgcgctacctataattacgacataatccttttcgcgcatagcacgtcctctggtaaaaaattaccaaccctgtcaatccacaagaatatagatactgcaaagacggtttaaacatgtgttcatatttaaacatgtgctcatagtatgcatgttttacgtaaagtaaattaccgccagagaggcaaaatgggcagatttgagcaggctcacaaaatgcgattaaatgcctgaattacaaaagcgaggaatttgtgacgggatgcacagaacagaacaataaaaaagggcagaaaataatctgcccttgaggaaataacctgagtgtttgatgaacgtttgaagtttctactgaaagataaaaccatttaaattcataaaattacattcacaaaccggtcattctctttgcgctcatcaaatgttacaggacaggaaatttctgccctgtaacacaccttttattacgctgctttcgctactgcgtccacttccggacgtttcaggaaggcataggccaaacccgccaccagcgtaccggcaataattgctaccaggtaacccaataccggcgtaatagcgccagggatcagcagaacaaacagaccaccgtgcggtgccatcagtttcgcaccaatcgccatactgattgcgccagtcagcgccccacccacgatacagcacggcagcacacgcatcggatcacgagcagcaaacggaattgcaccttcgctaatgaagcacagtcccaataccagagcggctttgccaccttcctgctgcgctttgtcgaatttgcgacgcgccaccattgttgccagacccattgccagcggtggcaccatacctgccgccataatcgccgccatcgggccataggtttgagtactcagcagacccacaccgaatgcgtacgctgctttgtttaccggaccgcccatgtcagtacacatcatgccaccgaggatcgcccccagcagaaccgcattcgcagtccccatggtctgcagccagtgagtcagcccttcgagaatgccagcaactggtttaccgatcaggtagatcatcgccagaccgaccaccagactggaaattagcggaatgatcaggatcggtttcagcgcctccatactctgtggcagtttcaattgcgtactgattaacttcgcaatgtaaccagccaggaagcccgcaataataccaccaatgaagccagaaccggtgctgaccgccagcataccgccaatcagacccggagtgaggcccggacgatcggcaatggaaaaggcaatataacctgccagtaccggcaccatcagcgcaaaggcactaccaccaccaatctgcatcagcgccgcagccaacgtacccggctctttaaacgcttcgataccaaaagcaaaagaaagcgcgatacacagaccacctgcaacgaccatcggcagcatgtaagaaacgcccgtcagcaagtgacggtatgcgcctgcactctctttcttactttcagtggtcgccgtttgagctttgcccgccggttcatacggcgttgcttcagcaaccgctttatccagttcctgcgcggttttcttcagcgccagaccggtagaggtacgatacatcggtttaccagcaaatttcgccagatccacttcgatatctgccgccacaatcaccagatccgctgctgcgacttcttcgggagtgattgcattacccgcgccaacagaaccacgggtttcaactttcacccaccagccacgttttttcgcttcggtttcaatggcttcagccgccataaaggtgtgtgctacgccagtcgggcaagcagtcaccgcaactacgcgtttcggaccgctggcggcaactggtgctgtcgcagcgaccggcgcagtgtaaggtttcgcatggcctttggcttcactcaggaacagctcagggtgcgcaactgcccgggaaatatcgcccagccagacatttttaccgttcagcgcgctgtcgttcgggatggaatcaccgagaacaatcgccatttcagcgtcgttcggattgtcgatgatttccagttttgcttttcgcgccgccgcgcccagcagggtcttcgccatataggcgcgtgcctgaccgagattagcgtcaataatcagcagcgttttcattatgcctctcctgctgtcagttaaaaggttgtaagtcgacgcgcgccatcattgcggccaactgcggacgatcggtaatacccacattgctttgacttaccgccagggctgcaacagctgtcgccagacgcagtgtgtgttcactggattcacgcatcagcaagccataaatcaggccaccaaccatagaatcccctgcgccaacggtgcttacgacatcgacactcggtggtttggcgatccattcgccggaggcattaacccaaagcgcgccttcggcacccagactaataacaacatgcgcgatgccttgttcacgtagcgcatgtgcagcttcaatcacatctttcatttcaggcagtttacggcctgcccagatttccagctcgcggcggttaggtttcaccagccacggtgccgctttcaaacctgctactaacgcttcacggctactatcaaagataatgcaaggacactgactacgcaggcgagtcatccagtcggtgaacgcttccgggctgacgccactcggtaagcttccgctgacacagaccatatcgaactgaccgagccagctcagagaatcagtcacaaagcgttcccagtcggcgggggtgacttcaaaaccgctgaagttgaagtcggtcacttcgccgtctttttccgtcagcttaacgttaattcgggtgcgcccctgtacaacctggaaacggttggcaatgcccagctcgctgaacagttgctgaaaaccatcctgattgtctttacccaggaagccgccaacggtgacatcaattcccaggtcttttaatactttggccacgttgatgcctttacccgccgcatgcagaccggtggttttcaccaggttcacttcgccgcgttcaatttccgggcagaaaccaacaaggtcataagccggattaagggtgatagtagcaacacgtctgctcattatgcgccctccccaagaccagcagcgatagcgtcgccgattgctttcagcgcctgttcagcatctgcaccctgggcggtaaagcgtaggcgatgacctttcttaacgccaagtgccacaactttcatcagactacgtccgtttgccggtttgccggtaccatcaaggtttgtcacggtaatatcactgttaaattgtttaatggtattgaccagcatggtacctggacgagcatgcaggccgtgttcattgcgcaccacaaactccgcgcttaacacgtcgtcggtcggcgcatcatcgctggtcagcagcgccagcaacgttgccgcatccgctttcagcaagcggtcagctttattgtcgagcaataaatcagcgagacgcttaagaaccgcgatgggctgatcgtcattcatcgccacactcaccagcatggctgccgtttcgccgtccacatcaaaagcatttgccgcacggcttaccgcaatcgcgctacgcagattgccttcggcgctatcgctcagccagataccctgtccgagattcagcggttgttcattgatggctttggtgacgaaagtggcgtcaactgcccccgcctctttcagacgcgcagcgttcagcgcctgaagagtcagcagatcgctggcgacgatatccagtgtcagcatttcgttgtcgagcttcagctgctcactctgcttttcgcccatcagtaatgcgcgaagttcttctgctgttgttgcactcttcagttgttcagcaacggaatcatcgctcagtacgtgggtcagctggcgtagcaggcccagatgttcatcgctgctggcagcaataccgattgccacgtacgctacctgaccgtcaccccaggtgacgccttccgggaactgaaatacctgaacgccggttttcagcacctgatcgcgggtgtcggtagtgccgtgtggaatagcaataccattgccgaggaacgtactggtttgctgttcgcgcgccagcatgccattgacgtagccttctgctacattaccggcctgcaccagcgccgcagcgacctggcgaatcgcctcttctttgtctccggccttttcgcccggatggatgtcctgtacggataactggaacatagttctcctctcttgctgaattgaaacgattcagcctctatgagaaaaaaagcgccaacctggcttagggttaaagacaagatcgcgctgaaacgtttcaagaaagcataatacttctgtttcagcacgcaaggaaagccgtaaagttatgagcaaaagtttgatgtgctgcacaattttttgccatttttcctaattgctgatgggaaaatccgttatcagcaatttcatttcagcagcgtcagcagccaatcagcaacagtgaaatggcattttgactattcgtggcgcttttgatttcgctgtctgtttattttctgacaagcagcgtaaactccgcgtcttcctcttccagtgatcgaccagcatgcataactcccccgcagtctccagcgcgaaaagctttgacctgaccagcacggcgtttttaatcgttgcctttctcaccggtattgcgggcgctctgcaaaccccgacactcagtatttttcttaccgatgaagtacatgcccgtccggcgatggtgggattcttctttaccggcagcgctgtcattgggattctggtaagtcagtttctcgccgggcgctctgataagcgcggcgatcgcaaaagcctgattgtcttttgctgcctgttaggcgtgctggcctgcaccctttttgcctggaatcgcaactactttgttttgctattcgttggcgtctttcttagcagctttggcagcaccgctaacccgcaaatgtttgcccttgcccgtgaacatgccgacaaaaccggacgtgaggcggtgatgttcagctcttttttacgcgctcaggttagtctggcatgggtcattggcccaccgctggcttatgccttagcgatgggtttcagctttacggtaatgtatctgagcgcagcggtagcgtttattgtttgcggtgtgatggtgtggctgtttttaccgagcatgcgaaaagagcttccgctggcgaccggcacgatcgaagcgccgcgccgtaaccgtcgcgatacgctgctgctgtttgtcatttgtacattgatgtggggcagcaacagcctgtacatcatcaacatgccgctatttattatcaacgaactgcatcttcccgagaaactggccggtgtgatgatggggaccgccgccgggctggaaatcccgacgatgttgattgccggatatttcgccaaacgtctgggtaagcgtttcttaatgcgcgttgctgccgtgggtggcgtctgtttttacgcaggaatgctgatggcgcatagtcctgtcattctgttgggcttgcagctgctaaatgctatttttattggcattctgggcggcatcgggatgctctattttcaggatctgatgcccggtcaggcgggtagtgccaccacgctctataccaacactagccgcgtgggctggatcatcgcaggaagtgtggcgggcatcgtcgccgagatctggaattatcacgctgtgttctggtttgcgatggtgatgattatcgccactctgttttgcttactgcggattaaagatgtttaaggcgcggtcagcatttccagatcgataagccaggtcatggcctgctgacggctgttaccgcacatttcagcgctggcttgtaagcctgcacagactttcggtcgcagtgggctggtgaaaattttacagcgttgctgttcatcaagctgaatgcagggcgtattggcgggcttgccatctggcataccgggaatagggctggaaatactaggggcagtgcaacacgccccgcaacccggacggcattccatacgttgttctcttaaggttaaccaccggattgatgagcgcgcacagtaccaccttttttgcaccagcaaaagtgcgaataccacttgcccgaaaggcccgtcgcgagtactttgtcgcgatatttttgacattttcgactacaggaatttttcgatgccaagagcgaacgaaattaaaaaaggtatggtactgaattacaacggcaaactgctgctggttaaggatattgatattcagagccccactgcccgcggtgccgctacgctgtacaaaatgcgtttttctgatgtccgtaccgggctgaaagtagaagagcgtttcaaaggtgatgatatcgttgacaccgtgacgctgacccgccgttacgttgacttctcctatgtcgatggcaacgaatatgtctttatggataaagaagactataccccgtataccttcaccaaagatcagattgaagaagagttgctgtttatgccagagggcggcatgccggacatgcaggtgctgacctgggacggtcaactgctggcgcttgagctgccgcagaccgttgatctggaaatcgttgaaaccgcaccaggcatcaaaggggcatctgccagcgcccgtaacaaaccggcgacattgagcactggtctggtgattcaggtaccagaatacttaagcccgggcgaaaaaattcgtatccatatcgaagaacgccgttatatggggcgtgctgactaacttcagccgcatgcagaaaagggatagctcaggctgtcccttttttaatttattataccaatcttctattttgcgcttcctgaacaccttacgccctcaattttcactcgttgattgatcgccctcacacttcatcgcattaacaatccagaccaatttcaattgctgtcatataactttacactgtcgttgttaattaatcgttactaagacgtgactcctatgaatacaatcgcctccgttacgctcccgcatcatgtacacgctccacgctatgatcgccagcagttgcaaagtcgtatcgttcattttggctttggagcctttcaccgcgctcatcaggcgttactgaccgatcgtgtgctgaatgcccagggcggcgactgggggatctgtgaaatcagcttgttcagcggtgatcaactgatgagccagctccgcgcacagaaccatttatataccgtgctggagaaaggtgcggacggcaatcaggtgataattgtcggtgccgttcacgaatgccttaatgcaaaactggattccttagcggcaattattgagaaattttgcgagccacaggtggcaattgtttccctgacgattaccgaaaaaggctattgtattgacccggccaccggtgcactcgacaccagtaatccgcggattattcacgatctacaaacccctgaagaacctcactccgcaccgggtattctcgtcgaagcactgaaacgccgccgtgagcgcggccttacaccgtttaccgtgctctcctgcgacaatattcccgacaatggtcatgtggtgaaaaacgcggtgctgggaatggcagaaaaacgtagcccagaactcgccgggtggataaaagagcacgtcagttttccgggaaccatggtcgaccgcattgttccggctgcaaccgacgaaagtctggtggaaatcagccagcatctgggggtgaatgatccctgcgcgattagctgcgaaccgtttatccagtgggtggtggaagataacttcgtcgctgggcgtcctgcctgggaagtcgcaggtgtacaaatggtgaatgatgtcctgccatgggaagagatgaaactgcggatgcttaatggcagccactcttttctcgcttatctgggttacctcagtggattcgcccatatcagtgattgcatgcaggatcgcgcatttcgccatgccgccagaacattaatgctggatgagcaagcgccgacactgcaaattaaagatgtcgatttaacacaatatgcggataagttaattgcacgttttgctaatccggcgctgaaacataagacctggcaaatcgcgatggatggcagccagaaattaccgcaacgcatgctggcaggtattcgcatacatcaggggcgcgaaacggactggagcttgctggcattaggcgttgcaggctggatgcgttacgtcagcggcgttgatgatgccggaaatgccattgatgttcgcgatccgcttagcgataaaattcgcgaacttgttgcgggcagcagcagtgaacaacgcgtaaccgccctgctttccctgcgtgaagttttcggtgatgatctgccagataacccgcattttgtgcaggccatcgaacaagcctggcaacaaatcgtacaattcggcgcacatcaggcgctattaaacaccctcaaaatttaacgatttctgcggttaaagcggatgaagctcaccttcgtccgctctccccttctcttttctgccttttttagccaggattaacgctcagttaacttaccagagtattgcggagccgttgtgaccaggaccaacctcatcaccggttttctcggcagcgggaaaaccacgagcattcttcatctgttagcccataaagatcccaacgaaaaatgggcggtactggttaatgaatttggggaagtcggaattgatggtgctttgctcgccgatagcggcgcattgctgaaagagatccccggcggctgcatgtgctgcgttaatggtttacccatgcaggtagggttgaataccttactgcgtcagggaaaaccagaccgcttgttgatagagccgaccgggctgggccatccgaaacagatcctcgatctgttaaccgcaccagtctatgaaccgtggatagatctgcgcgccaccttgtgcattctcgatccgcgcttgctgctggacgaaaaaagcgccagcaatgaaaacttccgtgaccagctggctgccgcagacatcattgtcgccaataaatccgaccgtacgacgcccgaaagtgagcaagcgctacagcgttggtggcagcaaaatggtggcgatcgacaattaattcacagtgagcatgggaaagttgacggtcatcttctggatttgccgcgtcgcaatttagccgagttgcccgccagcgccgcgcattctcatcagcatgtcgtgaaaaaagggttagcagcgttaagcctgccagagcatcaacgctggcgtcgcagtctgaacagcgggcaaggatatcaggcctgcggctggatattcgacgctgatacggtattcgacaccattggcattctggaatgggcgcgacttgcaccggtggaacgcgtcaaaggcgtgctgcgtattcccgaagggctggtgcgaatcaaccgtcagggcgatgacctgcacattgaaacgcaaaacgttgcgccaccggacagccgtattgagctgatttccagcagcgaagctgactggaatgccttgcagagcgcgctgttgaagcttcgtttagcgactaccgcgtaaggttgcctgcgtttttcagtaagataattagagaaaatatgattaaaaatttgccgcaaatagtgttgttgaatattgtcggcctcgcgctgtttctttcctggtatatccccgttaatcatggattctggttgccgattgatgcggatattttttatttctttaatcagaaactggtcgaaagtaaggcctttttgtggctggttgcattgaccaacaatcgcgccttcgacggttgtagtctgctggcgatgggtatgttgatgctgagtttctggctgaaagaaaacgcccctggcagacgacgtatcgtgattattggtctggtcatgctattaactgcagtggtattaaaccagctgggtcaggcattaattcctgtaaaacgggccagcccaacattgacttttaccgatattaaccgcgtcagcgaactgctctctgttcccacgaaagatgccagtcgagatagctttcccggcgatcacggcatgatgctgcttatttttagcgcattcatgtggcgttatttcggcaaagttgcaggccttatcgcccttattatttttgtggtttttgcatttcccagagtaatgattggcgcacactggtttactgacatcattgtcggtagcatgaccgtgatattgatcggtttgccctgggtgttgctgacgccattaagtgatcgattaatcaccttttttgacaaaagtctaccaggaaaaaacaaacatttccaaaacaaataactcacagtaattaacatcatcagggttatttttatagtgaggataatcctgatgatgcgcaccgtgctttcatctatcgaacgcaaaaatcattctctaagtaaatgaatggattgcatgcgtttcactcaattgtactttaattgaccaaccccgcttattaactttctgtatcactttttcttataaaaaatcatgtaaaaccgctcgccaagaccgcaccaatcgggtaatctcgaactcgttttgcctcggcggtagattatcctcacagcatataattttgtgcgttagtccacagatttggccttaaggaattgtttcaacatgcccaggtaattagtctcgtgtcgcttggcatttttttataacgatatttgtcgttaaggacttcaagggaaaacaaacaacatggtcaaatctcaaccgattttgagatatatcttgcgcgggattcccgcgattgcagtagcggttctgctttctgcatgtagtgcaaataacaccgcaaagaatatgcatcctgagacacgtgcagtgggtagtgaaacaagtagtctgcaagcttctcaggatgaatttgaaaacctggttcgtaatgtcgacgtaaaaagccgaattatggatcagtatgctgactggaaaggcgtacgttatcgtctgggcggcagcactaaaaaaggtatcgattgttctggtttcgtacagcgtacattccgtgagcaatttggcttagaacttccgcgtagcacttacgaacagcaggaaatgggtaaatctgtttcccgcagtaatttgcgtacgggtgatttagttctgttccgtgccggtagtacgggacgccatgtcggtatttatatcggcaacaatcagtttgtccatgcttccaccagcagtggtgttattatttccagcatgaatgaaccgtactggaagaagcgttacaacgaagcacgccgggttctcagccgcagctaataaaccgtttggatgcaatcccttggctatcctgacgagttaactgaaagcactgcttaggcagtgcttttttgttttcattcatcagagaaaatgatgtttccgcgtcttgatccaggctatagtccggtcattgttatcttttaaatgttgtcgtaatttcaggaaattaacggaatcatgttcatacgcgctcccaattttggacgtaagctcctgcttacctgcattgttgcaggcgtaatgattgcgatactggtgagttgccttcagtttttagtggcctggcataagcacgaagtcaaatacgacacactgattaccgacgtacaaaagtatctcgatacctattttgccgacctgaaatccactactgaccggctccagccgctgaccttagatacctgccagcaagctaaccccgaactgaccgcccgcgcagcgtttagcatgaatgtccgaacgtttgtgctggtgaaagataaaaaaacattctgtagttctgcgaccggtgagatggacattccactcaatgaattgattccggcgctcgacattaataaaaacgtcgatatggcgatcttacccggcacgccgatggtgccgaacaaacccgcaatcgtcatctggtatcgcaaccctttgctgaaaaatagcggcgtctttgccgctctgaatctcaacctgacgcctagtctcttttatagtagtcggcaggaagattacgatggcgtcgccctcattattggcaatactgcgctatctaccttttctagtcgtttgatgaacgttaacgaattaaccgacatgccagtccgtgaaactaaaattgcgggcattcctctgaccgttcggctttatgcagatgactggacatggaacgatgtgtggtacgcatttttactgggcggcatgagtggaactgtcgttggcctgctctgctattacctgatgagcgtacgtatgcgccccggcagagaaatcatgaccgccatcaagcgcgaacaattttacgtggcgtatcaaccggtggtggatacacaagctttgcgagtaacgggcctggaagtactgctacgctggcggcatcctgtcgcgggagaaattcccccggatgccttcattaactttgccgaaagccaaaagatgattgtgccgctgactcagcacctgtttgagttaattgcccgcgatgccgcagaattagaaaaagtgctgccggtaggcgtcaaatttggtattaacattgcgccggaccatctgcacagcgaaagctttaaagcagatatccagaaactgctcacttccctgcccgcacaccatttccagattgtgctggaaattaccgagcgcgatatgttgaaagagcaagaagccacacaactcttcgcctggctgcacagcgtcggcgtagaaattgctattgatgacttcggcaccgggcacagcgcgcttatctatcttgagcgttttacgctcgattatctgaaaattgaccgtggatttatcaacgccatcggtacggaaacgatcacttcccccgtacttgacgcggtgctgacgctggcgaaacgcctcaatatgctgacggttgctgaaggggtcgaaacgccggaacaggcgcgatggctaagcgaacgcggcgttaatttcatgcaaggctactggattagccgcccgttaccgctggacgattttgttcgctggctaaagaaaccgtatacgccgcagtggtaaggtgtgcttacgtcccttattattcatagtgaaagcatgccggattgcggctaatgatgagtaaaaggaaatccgttgcagatgattgtgcgcatactgctgctgtttatcgctctgttcacctttggtgtgcaggcgcaggctatcaaggaaagctatgcctttgccgtgctgggcgaaccccggtacgcgtttaatttcaaccattttgattatgtgaaccccgccgcgccaaaaggtgggcagataacgttgagtgccctcggcaccttcgataatttcaaccgctatgcactgcgcggcaacccgggcgcacgcaccgagcagctgtacgacacgctatttacgacttccgatgacgaaccaggcagttattacccgctgattgctgaaagcgcacgctatgctgacgattattcctgggtggaggtcgctattaatccgcgcgcccgttttcatgatggtagccccattactgcccgcgatgtagagtttacttttcaaaaatttatgaccgaaggcgtgccgcaatttcgtctggtctacaaaggcaccaccgtcaaagccattgcaccgttaaccgtgcgcattgagttagctaaacccggcaaagaagatatgctgagtctgtttagcctgccggtatttccagaaaagtactggaaggatcacaaacttagcgacccgctcgccacgcctccgcttgccagtggtccgtaccgcgttacgtcctggaaaatggggcaaaatattgtctattcccgtgtgaaagattactgggcagcaaacttaccggtaaaccgtggacgctggaatttcgacaccattcgctacgattattacctcgatgataatgtcgcctttgaagcgtttaaagcaggtgcctttgatttgcgtatggaaaacgacgccaaaaactgggccacgcgttataccggtaaaaatttcgataaaaaatacatcatcaaagatgagcaaaagaacgaaagtgcccaggatacgcgttggctggcgtttaatatccaacgtccggtattcagcgatcgccgggtccgggaagctatcactctcgcctttgactttgaatggatgaacaaggcgttgttttacaatgcctggagtcgcacgaacagttattttcagaataccgaatacgcggccagaaattaccccgacgccgcggagctggtgcttctggcaccaatgaaaaaagatctaccgagtgaagtcttcacacaaatctaccagccgccggtatccaaaggcgatggctacgatcgtgacaacctgttaaaagccgacaaacttctcaacgaagcgggctgggtgctgaagggtcagcaacgcgttaatgccacaacgggtcagccactcagctttgaattattgcttcccgcaagcagcaatagtcagtgggtattgccgttccagcacagcctgcaacggctgggtatcaacatggacattcgcaaggtggataacagccaaatcactaaccgcatgcgcagtcgcgactatgacatgatgccgcgcgtatggcgggcgatgccgtggcccagttccgatttacagatttcctggagtagcgaatatatcaattccacttataatgcccccggcgtgcaaagcccggttatcgacagcctgatcaaccaaattattgccgcgcagggaaataaagaaaaattactgccgttggggcgagcactggatcgcgtattaacgtggaattattacatgctgccaatgtggtacatggcggaagaccgtctcgcctggtgggataaattctcccagccggccgtgcgccccatctatagcctcggtatcgatacctggtggtatgacgtcaataaagcggccaaactgccgtccgccagcaaacagggagagtaaatgggcgcttacctgattcgccgtctgttgctggtgatcccaacattatgggcgattatcaccatcaactttttcatcgtgcaaattgcgcctggcggtccggtcgaccaggccatcgccgccattgagtttggtaatgccggagtattacccggcgcaggcggtgaaggtgttcgtgccagccatgcgcaaacgggtgtcggcaatatcagcgacagtaattaccgtggcggacgcggattagatccagaagtgatcgctgagatcactcatcgctacggttttgataagccgatccacgaacgttacttcaaaatgctctgggactacatccgctttgattttggcgatagcctgtttcgcagcgccagcgtgctgacgctgattaaagacagtctgccggtttccatcaccctcggattgtggagcacgctgattatctatctggtgagcattccgttaggcattcgcaaagctgtttataatgggagccgctttgacgtctggagtagcgcatttatcatcatcggctacgccattccggcctttttgtttgccatcctgctgattgtcttcttcgcgggcggcagctatttcgacctgttccctctacgcggcctggtttccgctaactttgatagcctgccgtggtatcagaaaatcaccgattatctgtggcatatcacgctgccggtgctggcgacagtgattggtggctttgcggcgctgaccatgctgacaaaaaacagtttccttgatgaagtgcgcaagcaatacgtggtgaccgcgcgtgcgaaaggggtaagtgaaaaaaatattctctggaaacatgtgttccgcaacgccatgctgctggtgattgccggttttccggcgacgtttatcagcatgttttttaccggcagcctgctgattgaggtgatgtttagtctcaatggtctgggcttactgggctacgaagcgaccgtcagccgcgattatcctgtaatgtttggtaccttgtatattttcaccctgattggcctgctgctgaatattgtcagtgatatcagctatacgctggttgatccgcgtattgattttgagggacgttaatgagccgactcagccccgtcaatcaggcccgttgggcgcgttttcgtcataaccgtcgcggctactggagcttatggattttcctcgtcttgtttggtttgagtttgtgttctgaacttatcgccaacgataaaccgttgctggtgcgttatgacggcagttggtatttcccgttattgaaaaactacagcgaaagcgattttggcggcccgctggcaagtcaggctgattatcaggacccgtggctgaaacaacggctggaaaataacggctgggtactgtgggcaccgattcgctttggtgctaccagtatcaactttgctaccaataagcccttcccttctccaccctcccggcaaaactggctgggaacggatgccaacggcggcgatgtgctggcacgcattctctatggcacgcggatcagcgttctgtttggcctgatgctgactctctgttccagcgtgatgggcgtgctggcgggggcgctacaaggctattacggcggtaaagtcgatctctggggacaacgctttattgaagtatggagcgggatgccgacgctgtttttgattattttactttccagcgtcgtacagcctaacttctggtggctgctggcaattactgtcttgtttggctggatgagtctggtcggcgtggtgcgggcggagtttttacgtactcgtaatttcgactacattcgtgcggcacaggcgcttggcgtcagcgatcgcagtatcatcctgcgtcatatgttgcctaatgccatggtcgcgaccctcacctttttaccgtttattttatgtagtagcataaccaccctgaccagcctcgatttcctcggcttcggtctaccgctcggtagtccgagtctcggtgaactgctgttacaagggaaaaataaccttcaggccccgtggcttgggatcaccgccttcttgagcgtggcgatattattgtctttgctgatctttattggtgaagccgtccgcgacgcatttgatcctaataaggcggtgtaacatgacgcaaactctgttagcgattgaaaatttgagcgtgggttttcgccatcagcaaaccgtacgtacagtagtcaatgatgttagtctacagattgaggctggcgaaacgctggcgctggtgggtgagagtggtagtggcaaaagcgttaccgcgctgagtattttacgcctgctcccttccccgccggttgaatatctctccggcgatattcgttttcatggcgaaagcctgcttcacgccagcgatcaaacgttgcgcggtgtacgcggtaataagatcgccatgatttttcaggaaccgatggtgagcttaaatccattgcataccctggaaaaacagctttatgaagtgcttagtctccaccgcgggatgcgtcgggaagcggctcgtggcgaaattcttaactgccttgatcgcgttggtatccgccaggcggcaaaacggctgacagattatccgcatcagctctccggcggcgaacggcagcgggtgatgattgcgatggcgctgttaacgcgaccggaattattaattgccgatgaaccgaccaccgcactggacgtctctgtccaggcgcagattttacagctgttgcgcgaactgcaaggcgagctgaatatgggcatgctgtttattactcataacctcagcattgtcagaaaactggcccaccgcgtggcggtaatgcaaaacggtcgctgtgtcgagcaaaattacgccgctacgctatttgcaagtcccactcatccttacacacaaaagctactcaacagtgaaccgagtggcgatccagtgccgttgccagaacctgccagtacgttgctggatgttgaacagcttcaggttgccttccccattcgcaaagggattttgaagcgcattgtggatcataatgtggtggtgaaaaacatcagttttacgctacgagcgggtgaaacactgggtttagtgggcgagtccggttccgggaaaagtacgacgggactggcgctgctgcgactgattaattctcagggcagcatcatctttgacggtcagccactgcaaaatttaaatcgccgccagctgttacctattcgtcatcgcattcaggtggtatttcaggatccaaactccagcctcaacccacgactcaacgttttgcagattattgaggaaggcttacgggttcaccagccgacgctttctgccgcacaacgcgaacaacaagtgatagccgtgatgcatgaagtgggattagatcctgaaacacgccaccgttatccggcggagttctctggtggtcagcgacaacgtattgcgattgccagggcattaattcttaagcccagcctgatcatacttgatgaaccgacaagtagtctcgacaaaacggtacaggcgcaaatattgacgctattgaaaagtttgcaacaaaagcatcaactggcctatttgtttatcagccacgatttgcacgttgtccgcgcgttatgtcatcaggttatcatactgcgacaaggggaagtagtggaacaaggaccgtgcgcgcgcgtgtttgccacaccgcagcaggagtatacgcgtcagctactggcgttgagctgacgcttaaaaaggattgtagttactaaagggttcggcaattgccacaccaaaatttttcaatcggcatgttgcagcaaactcgtcctggcgatttacaaacaggcacggctcaccttcacactccagcacgctacatggaacttcgatgtcgcttaacgcctggcttagtttatacatcacgctccatgcattatcaccatccgggctaagcaatttaagcgccaccaggctgttgtcaccgcacggtccattttgcggaatcggttcaaccttgctacctgcgaaaccagcagaccagcgatagttctgcggcagtcgatggacgatactgagttgtaaactagtcacttattttccccggaagcacattcacttcacaatttgtttacatcaattttaacacatcatcaacaatccgtctttatacagatcgtaaagattgatgcctcgcctgcgtggcctctatggctctgatttaagtaatatctgcgggcgtggtcacgtttgcggggctatatgtacccgtttctgcgatctaactcaacctttttaactacaatgatgtgactttttacataaattgattttacataaaataaacatatatcgggggaatgatagatttgtggttgacatgcatcaacaaaggaagccttttagcttcctcgttgtgcaatagatcaccgttttttcggccgactggcgtacagacagaagagaatggagctggttgcgcagaatgcaatactccaaatcatcggccatgcagagttaaaggtcgcaagagaaagcaatgcgccaacaattgcccctatgccaaaacggaaggttcctgccaggctagatgccgttcccgccatatggggaaactcatcaagaatgaccgccatcgcattggaactcaccatgctcacgcagcccacaaacgccgcaacgccaaccaccaggctccaaaatcccagccccagcagcgcactgatgaccatccacgctgccataataaattgtatccacaacccgctgcggaacatatttaacgcgccaatgcggcggacgaagcggctgttaaagatggtcatcacgaacagaaaaacaatgtttagcgcaaagtaataaccaaagttttccggcgcgacgtggttaatttcaatataaacaaacggtccggcgcttaagaaactgaacatcccggcaaagctgaaaccactggcaagcatgtagctcaggacacgtttatggcggaacagcgccgcaaagttaccaatagtggtacgaatgtgaaatggctgacgacgctccggtggtaaggtttctttaatcaggaagaaaatcattgcgctagccagaatcgccgctaatgccaggatccagaagatgtaatgccagctcagccacaccagcacccagccgccaactatcggtgccatcagcggtgcaatggttgtcaccagcatgacaaagctcatcatccggctgaactcttctttcgggtaaatatcgcgcatcagggcgttaatgaccacgctggccgcagccgcagccagcccgtggaagaaacgcatcacaatcagctgatcgatggtgtttgccaacgcacacgccaccgcggcggcggcaaacaccagcgtaccgccgagcaccaccggcttacgcccgaagctgtctgccatcggcccgtagattaactgccccaacgcaaagcccagaatataagtactgagggtcatctgcgtactgcccgccggtacgccaaactgcgcactaattaccggtagcgcgggcagatacatatcaatgctcagcggcatcaacatggccagcaggccaaggataaaaacaatagcaaagctgctatgctgtcgggtggtcacaacgggctcctgaaagtcattgaaaagttagacgacgctggcaatttcttcttcagttaacggacgatattcaccgggggctaaatcagcatccagcgtaataccgccaatacgttcacgatgcagctcaaccacgtggttacccacggcggcgaacatgcgtttcacctgatgataacgcccttcgctgatggtcagacgaacctgcgttggggtaatcacttccagcaccgcaggcttagtgagatctttttcgttatgcagctgcacgcctttagcaaattgctctgccgtatcgtcagctacaggactttccagtgtcaccagataggtcttctcgcaatgatggcgcggagaagtaatgcggtggctccactgaccatcatcagtcatcagcaccagaccggtggtatcaatatccaaccgccccgccgcatgcagtttccacgctaccggttcatcaagaaaatagagcaccgttgggtgatcagggtcgtccgtggagcaaacatagccctgaggcttattgagcatgaagtaacgtggaccgtgttgctgcgccagcgggttgccatcgtaagcgacatcatgttcaggaagcagtttgaacgctgcattacggacgatttcgccatcgacggtgacacgattgccgcggatttcacgcccggcaatagcacggctaacgccgagttgctgtgcgataaatttatcaagtcgcatgtgtgtgattttgcctgtaaaaacggaggtcgggcattgacccgaaaatctgaactgttgtctgcccagtatagcggtctaataacatccctcaagggaaaaagatccatggcatactattagcagaataatctacctacgcgagaccatgatttttacacttcgcccatatcagcaagaagccgtggatgccacgctcaaccattttcgtcgtcataaaacccctgccgttatcgtgctgcccaccggcgcaggtaaaagcctggtgatagcggaactggcacggctggctcgtggtcgcgtgctggtgctggcacacgttaaagaactggtggcgcaaaaccatgcaaagtatcaggcgctggggctggaagccgatatttttgccgccgggctaaagcgcaaagagagccacggtaaagtggtatttggcagcgtgcagtctgtcgcccgtaatcttgatgcctttcagggtgaatttagcctgttgattgtcgatgaatgtcaccgtattggtgacgatgaagagagccagtatcagcaaatcctcactcacctgacaaaagtgaatccccacttacgcctgctggggctgactgccacgccttttcgattgggcaaaggctggatctaccagtttcattatcacggcatggtacgcggcgatgagaaagcccttttccgtgactgcatttatgagctgccgctgcgttatatgattaaacacggctatctgacgccgccagaacgactggatatgccagtagtgcaatacgatttcagccgcttgcaggcacagagtaacgggctgttcagcgaagccgatctcaaccgtgagctgaaaaaacaacaacgtattaccccgcacatcatcagccagattatggagtttgctgcaacgcgcaaaggggtgatgatttttgccgcgacggttgaacacgcaaaagagattgtgggattactgcctgccgaagatgcagcactgattactggcgacacccccggcgctgagcgcgatgtgttaattgaaaattttaaagcccagcgttttcgctatctggtcaacgtcgcggtactgaccaccggatttgacgccccgcacgtcgatcttatcgccattctgcgccctaccgaaagtgtgagtctttaccaacaaattgtcgggcgcggtctgcgtctcgctccgggcaagactgattgcttaattcttgattatgcgggtaatcctcacgatctctacgcgccggaagttggtacaccaaaaggcaaaagtgacaacgttccggtacaggttttctgccctgcctgcggttttgccaacaccttttgggggaaaacgaccgccgacgggacattgattgaacactttggtcgtcgctgtcagggatggtttgaagatgacgacggtcatcgcgaacaatgtgacttccgtttccgttttaaaaattgcccgcaatgtaacgcggaaaacgatattgccgcccgccgctgccgcgaatgtgacaccgtactggttgatccggacgatatgttaaaagcggcgctacgactgaaagacgcgctggtattacgctgtagcggcatgtctttgcaacatgggcacgacgagaaaggcgaatggttgaaaatcacctattacgatgaagacggcgcggatgtgagtgagcgtttccgtctgcaaacacctgcccagcgtaccgccttcgagcagctttttatccgcccgcatacgcgcacaccgggcatcccgctgcgctggatcaccgccgccgatatcctcgcccagcaagccttattgcgacacccggattttgtcgtcgcccgcatgaaaggccagtactggcaggtgcgtgaaaaagtgttcgattacgaaggtcgttttcgtctggcgcacgaattacgcggttaatggtagttttgattgatgtataaggcgattgagtatagaatctcgcccgcttttgcatacgcaaagcagatcacttacctgttgctgggtcgcctgtagcaggattaatttaagagagaaagaaatgtttactatcaacgcagaagtacgtaaagagcagggtaagggtgcgagccgccgcctgcgtgccgctaacaagttcccggcaatcatctacggtggcaaagaagcgccgctggctatcgagctggatcacgacaaagtcatgaacatgcaagctaaagctgaattctacagcgaagttctgaccatcgttgttgacggtaaagaaatcaaagttaaagctcaggacgtacagcgtcacccgtacaaaccgaagctgcagcacatcgacttcgttcgcgcttaattgctgaataagttgtaaaaaaccccgctccggcggggttttttgtatctgcagattatgcctgattacggtattgctattttttgcaggccagataaggcgttcacgccgcatctggcattcagaacacaaaaccgattaattgccgccagacgtccggcgctgcaattggtcgcgcaaattcggcggcgtgcctttaatggtcaaggtatcggttgctggatcccagaagatgcgttcacctaacagcatcgcatcaaagttaatagtcaagccaccgccgctaccggcaaacttcgtcaactgacgcagtgtgctacggtctgccgggaagctctcttccagttcgtagcctttttcagccgcaaactccgtgaagctcacttcgcttacgcctgccagctctttgctcaggcttttcagttcgatctcttcgcctgcctgcagctgctcattacagtagctataaacctgctggcgcacgttctgtcgctctgctttatccagttgtgcttcggcagtgaaatcatcaaccgcttgcaacagcccacggttttgcgctttcgcgtttaacccttcgctggccccgaggaaatccataaagaaatccgccactttgcgccctactcgccctttcaggaaagtgagatagcgggtggactctggattggtttcccattcggttaaatcgatacgcgcaacaatatccgcatgattgatatcaagataatgggttgggttgatgtcgagattttcgttaacgcgcatactgctcaggttgctcagaactgccaccagcaaatactccaccgccagatagcgatagtggcaaaacagcacgaatccaccgtcagcaaaaggatatttcgctaattcgtcacgcaggcggccggttgccgcgcggctaaatgccaggaagtcctcttcgccctgacgctgtaagcgcagcgtctgcgccagttcactctcttcgctaaacaagccgtaagctttatttttggcgctatagacccgatgcagttctgccaccatctcaacgacggtttctgtcggttccagcaaactatcgcgcaacaccagctcaaggttctgctcatcacgcttgataagctggtgcagagcaatctggttgatatccagactcatgataaactctcctttaagaccgggcggtattcaaccaccgccggttaagcgacgcaataaaagatggcggtcattttacagaaggcagcgtaacgagaatgatttaacgcataaaaaagcagaaaaaaaaccgttgctacggtaatatgttgccctttcatcaactaactgatttcgatttatgccacaaatttcccgctacagtgatgaacaggttgaacaattgctcgcagagctgctcaacgtactggaaaaacataaggctccgaccgacctttccctgatggtgttaggcaacatggtcactaaccttatcaacaccagcattgccccggcccaacgccaggcaattgccaactcttttgcccgcgccttacagtcctctatcaacgaagacaaagcgcactaagggaaacagataacaggttatggtaactcatcgtcagcgctaccgtgaaaaagtctcccagatggtcagttgggggcactggtttgcactgttcaatattctgcttagcctcgtcattggcagccgttacctgtttatcgccgactggccgacaacgcttgctggtcgcatttattcctacgtaagcattatcggccatttcagcttcctggtgttcgccacctacttgctgatcctcttcccgctgacctttatcgtcggctcccagaggctgatgaggtttttgtccgtcattctggcaacggcgggaatgacgctattactgatcgatagcgaagtctttactcgtttccatctccatcttaatcccatcgtctggcaactggttatcaacccagacgaaaatgagatggcgcgcgactggcagctgatgttcatcagcgtgccggttattttattgcttgaactggtgtttgcgacgtggagctggcaaaagctgcgcagcctgacgcgtcgtcgacgcttcgcgcgcccgctggccgcattcttatttatcgcctttatcgccagccatgtggtgtatatctgggccgatgccaacttctatcgcccgatcaccatgcagcgcgctaacctgccgcttagctacccgatgacggcgcgacgttttcttgagaagcatggtctgcttgatgcgcaggagtatcaacgccgtcttattgagcaaggtaatccagacgccgtttccgttcagtatccgttaagcgaactgcgctatcgcgatatgggcaccgggcagaatgtgctgttgattactgtcgatggcctgaactacagtcgcttcgagaagcagatgcctgcgctggcaggttttgctgagcaaaatattagcttcacgcgccatatgagctccggcaacactacagacaacggcatctttggcctgttctatggcatcagcccgagctatatggacggcattctgagcacccgtacgcctgcggcattaattactgcgcttaatcagcaaggctatcagctggggttattcagtagtgatggctttaccagcccgctgtatcgccaggcattgttgagtgatttcagcatgccgagcgtacgcacccaatccgacgagcagaccgccacgcagtggatcaactggctgggacgctacgcacaagaagataaccgctggttcagctgggtttctttcaatggtactaacattgacgacagcaatcagcaggcatttgcacggaaatatagccgggcggcaggcaatgtcgatgaccagatcaaccgcgtgctcaatgcactgcgtgattctggcaaactggacaatacggtggtgattatcactgccggtcggggtattccactgagcgaagaggaagaaacctttgactggtcccacggtcatctgcaggtgccattagtgattcactggccaggcacgccggcgcagcgtattaatgctctgactgatcataccgatctgatgacgacgctgatgcaacgcctgctacatgtcagcacacctgccagcgaatatagccaaggtcaggatttgttcaaccctcaacgccgtcattactgggttaccgcagcggataacgatacgctggcaattaccaccccgaaaaagacgctggtactgaacaataacggtaaataccgcacttacaacttacgtggtgaaagagtgaaagatgaaaaaccacagttaagtttgttattgcaagtgctgacagacgagaagcgttttatcgctaactgattaattataaatcagttagcgaaatatcttacttgcaatcggtgtggaaaacggtagtattagcagccacgagtcggcacgtagcgcagcctggtagcgcaccgtcatggggtgtcgggggtcggaggttcaaatcctctcgtgccgaccaaaaatcccaagaaaaaaccaacccttacggttggtttttttatatctgcaattaattcgataaacagaccgtgacacatcacagcctgtttattttctgttatcagaacgtcctgagctttcatcctatgaaattaattgctgttaaaagcattgggtacagaaaatacccatagctccatacccggagtcagtttttaaaaactgtttaaagaaatgcacaagtattgtgattgattttttagttgtttttcttgatgagaagctgatgcaaaattccgtctttataatgaaaatgatgccaaagcgaacgacaaggttgtagttttcactacatgtccatacataaaatggggtaacattcacgcgcctggtagcgttaccaacgctacgctcaaacataatgattctaataaaacctcaggagactactatgcctgaagcaacaccttttcaggtgatgattgtggatgatcatccacttatgcgacgcggtgttcgtcagttactggagcttgatcctggctctgaagtggtcgccgaagcgggcgacggcgcgagcgctatcgatctggcgaatagactggatatcgacgtgatcttgctggatctcaatatgaaaggtatgagtggcctggatactctcaatgccttgcgcagggatggcgttaccgcgcaaattattatcctgaccgtatccgatgcctccagcgatgtctttgcgctgatagacgcaggcgcagacggttatctgttgaaagacagcgacccggaagtattgctggaagcgattcgtgccggagcgaaaggcagcaaagtctttagcgaacgcgtcaatcagtacttacgtgaacgtgaaatgtttggcgcggaagaagatcccttcagcgtgctgacggagcgcgagctggatgttctgcacgagctggcacaggggctgagtaataaacagattgccagcgtgttgaatatttccgagcagacagtaaaagtacatattcgcaatctgctgcgtaaactcaatgtccgcagtcgcgtggcggccaccattctgttcctgcaacaacgcggggcacaataaaaatagcccgatggatttatcatcgggctgagatttatgacaaacgcaaaactgcctgatgcgctacgcttatcaggcctacgtggatcgatcaatttattgaatttacacaattttgtaggccggataaggcgttcacgccgcatccggcataaactaagcgcactttgtcaacagtctagcccgatggcatcaccatcgggcctctttttatttactctcctgcgggctcaaatgttgcatcgcctgcgcgatactacgttcaatcaccgcacggcgagtatcgttggcaggtaagagtttcaacatcatctcccacgcggcaacggcttcgccaaatcgctgctgctcaaaggcattaaacgcatacatgcttagcacacggatattgctatggtccgttctcaccagctgacgtagcagttcaccgccgaggcggttgtcgttgggatcagaactacgagtcaacgcttcagcgtatcccagtgcagcatcactgtttttcggatcgaggcgatacgcagtggcgtatgcatcggtggcgatactggcgttacccagcgccatgccaacgcggcccaacataatccagccttctatatctcccggatttttttgcagttgagtacgcatccccagcgcaagacggctcatctcttcttcgttgagcggatcggctttcggatccagcgccctgtccagcaacgccggagcctgtgccgtggcctgctgccagattttcacctgctgataattgccagtctggtagtagctgacgccagccacaattaacgccaccacaatacccggcagataaacaacatatccggcacgcttaccttccggcacgctttgttcaggaaacgcttccggcaccacgcgtacccgacgccggctgcgggcgtatatgacccaaccgccaatgccaatagccactactggcagcacccacagcagcacggtcagcggcgttaacggcggatcgtaagtgacgaagttgccgtaacgcgccaccatataatcgacaatctcttttttacttttaccttcctgcatcagttcatacactttctgacgcaggtcggtggcaatcatgctgttggaatcggcaatgctgttgttctggcatttcgggcagcgcagttcttcagtgagctgacggaactgttgttcctgtgcttcatctttaaactgcaacacatcgatggtcgccagcgcactgccggagatcatcagcatcagcacgcccaataaaaacctcattgtgcggcctccttactgtatttctcccacagcggcttgatctcttcttcccagacgcgaggattcagatcgcccgcatggcgatagcgaatgatgccgttgccgtcaataagaaacgtttctggcgcgccatagacaccgagatccagccctaacatgccatcgccatcaaacaggcttagcgcgtaaggattgcccagctctttcagccagctgattgccttctggcgatcgtctttatagttcatgccgaccacgcggatgccctgcgcagaaagctgattcagatattgatgttccgcacggcaggtcggacaccaggtcgcccagacgttaagcagtactggtttgccctgagtcagcacatccgcctgataaaactgccccggattgtccagactttcgagacgaaacttcggcacaggcttgccaatgagcgcgctttccagattggtcggatcatccccttcggcattacgcgccagctgccacagcagcgccgcggcaatcgccaggaagataatcaacggaattaacaatactttgcgcttcatacggcctccggcgcagttttttgcggactcacgcgcttacgatagcgaggatcaaacagacacagcagtccgcccaacgccatcatcagcccgcccgcccaaatccagcgaacaaatggtttgtagtaaagacgcacggcccacgcgccgttttccagctcttcaccgagggccgcgtacaggtcacgcgtgatgccgccgtcaattgccgcttcggtcatcatgctcccggcagtgttgtaataacgtttttccgcatacagcaccgtttccggcttgccatcgcgcgttacgccgatagtcgccacaccgccacgccagttcgggccagtcacctctttgacatcacggaaggtgaagcgatattcatgaatatcgacgctatcgccggacttcatgcgcacatcacgctcaacgctatagttctggctaaaggcaatgccaacaattgtcactgccagcccaaggtgagccgccaccatcccccaataactgaaggtggttttcgtgccgcgactaatacgtagcgcagcttccgcaattgccagcaccgcaatccagcaggccattgccaggccgagcaccgtcatcgccacaactttgctttcgaacagccacggcaacagcaggctcagcaccagcgtagagatgaaggcgataatcaataaattgcggatcttacgcgggcgatcccgcccccagcgcaccagaggaccgacaccaagcagtagcgcaaacggcaccatcagccaggtaaacatggtgttgaagaacggttcgccaatgctaatactgcccagtcccagttgcttatgcaccaacggcagcagcgtccccagcaacaccaccagcatcgcagcgaccagcaaaacattgttcgctaacagcaaagattcccggctccacagcgcattgtttacgcgactgcgaactttgtgtccacgcgcggcaaacagcagcaggctaccgccaatcaccagcaccataaaggcgaggataaacataccgcgcgccggatcagacgcaaacgcgtgtacgcttaccagcacgccggaacgcacgaggaaagtccccaacagacacaagctgaaggcactgattgccagcagtaatgtccacgctttgaagctggcgcgttgttcagtgaccgccagactgtgcatcagcgcagtccccaccagccacggcataaagctggcgttttctaccggatcccagaaccaccagccaccccagccgagttcgtaataggcccatgcggaaccgagcacgatgccgagcgtcaggaagatccacgctgccagcgtccacggacgagtaaaacgcgcataagtgctgtccagacgcccgctcagcaaagaagcaatggcaaaagcaaacgccacgctgaaacccacgtaccccatataaagcagaggcggatggaagatcagccccggatcctgcaatagcgggttaagatcgcgaccttcaatcgggaagttcggcaacgtgcgagagaacgggttagaggtaaagagaatgaacagcaaaaagccgacactgaccatccccattatcgccagtacacgggccacaatatccagcggaatacgctgactaaaaatcgccaccgcaaaggtccagccgctcatcagcagcacccacagcagtaggctgccttcatgcgcgccccaggtagccgccacgcgataccacaccggaagctgggtattggagttgctggcaacataggtgacggtgaagtcgttgaccacgaaagcattgaccagcaccagaaatgcgccagccacagacataaacagcagccaggcaaacaagcgggaagacgccatcatgcgcgcatctccgcgcgccacgccccatagcggatacacggacagcagcagcgcaattcccagcgccaggcacagcagtccgttaccaatttctggcatcatgatgctgggtccttataaacttacgtcaacttgctgggtccttataaacactcgccgggcgacggtggttagcttccatcgctttctcaacttctggcggcgtatagttttcatcgtgtttcgccagcacttctttcgcgaggatatgattgcctttttccagttcgccctgcaccacaacgccctgcccttcacggaacagatccggcaaaatgccttcgtaagagacatccacactgccttcagcatcgtaaatggtgaaggtcactttcaggctattgggatcgcgctgcacactacccggcatcaccatcccgccaacgcgcagacgctgaccgacttccggcatttgctgagtttcacgcttgccgtagagaatttcccccggcgtataaaagagatcgatattgctgcgcagcgcatatagcaccagaccgatagtcagcgccagccctgccaacacggcacaggcaatccacaagcggtttttacggcgaatattcatgcagcctcctgctgttgcgcagcacgtaaacgcgcctcacgcgcccgctgttgcgccacgccacgcagaattgcgcgatgttgcatcacgctgtgcacgaccaaaaccaccagcggaataacggtcatcaccaccgccagccagacaaaaaaggcgtaaccgcccattgcgaaaaattcattccaggaagcaaatgcaggggtcatttacggcctcttttcagtatcagttcactcacccacggacggcgtttttccatcagcaaaatcaaattacgcatccgcatcagcgtcagcgtggcagacaggagcaggaagccaaaaatgctccagcgcagcgggctacgcatcgccggatcgatactttgctgcatccgcgtacttccctgatgcagggtgttccaccactccacggagtaatgaataatcggcagattcaccacgccaatcagcaccaggatacctgccgcacggcccgccagacggcggtcgtcgaaggcgtgccacagggcaatcacacccacatacaaaaacagcagcaccagttcagaagtcagacgtgcatcccatacccaccaggtgccccacatcggttttccccatgcagagccggtaaccagggcaataaaggtaaacacggcaccaatgggggccatcgccgccaccgccaggttggccattttcatctgccagacaaggccaataaacgctgccactgccatacttgcataaatgcccatgctccagatcgccgcaggcacatgcaggtagataatgcggtagctatttccctgctgataatcagccggagcaaagccgaatccccagatccagccgacggtaagcacgaccacactggcaattgccagccacggtataaaccagccacagatttgatacagccgtggtgggatcgccagttgatgcagtgttttccacatagtttcgataccagactcgaacaaaaatcagtaatccagcgttattgaatgctgattcgtaacgctgccgccgtcgcaaaaggacttaatgtcgcggtgcctgccagcaacgcgcctaaaattgccagatacccgtcaacgggcaaatgcatagaagccgcgtccatcgcggcggtggcaaagatgagtaatgggatagtcagcggtaacaccagtatgctgagcagcacaccaccgcgcttaagtcccactgtcagcgccacgcccggtgcaccgagaaagccaagcgtaggcgttcccagcagcagcgtcagcgccatcacttgccagccataaacatccattcccagtagcattgctaccagtgggctaaggatgagtaacggcagaccggttaccatccagtgcgccatcaccttcgccagcacaacggcgggcaagggtaacggcaacaacatcaattgttcaagactgccgtcctgcaaatcgtcacggaacagtcgttccagcgccagcaaggaactaagcagcgcagcaacccagataatgcccggtgcaatacgcgccagcagttgcggctccggaccgatactgagcggaaaaagggtaattacaatcaggaagaaccacagcgggttggcgatttcggcgctatggcgaaacgctacacgcagctcaagacggaaaatgcgccagaacatcatgcggccctcgtttgcgtcagactaatgcggcgaattttactttcagcaacgttgagcggctggtgggtagtcagaatcacaatccccccctgctccgtatgctgcgccatacgctgggtcagacgatcgacaccgttaacgtcaatcgcggtaaaaggctcgtcgaggatccataacgtggcacgggtcagccacagacgcgctaaagcgacgcggcgttgttgcccggcgctgagctgatttacaggaatatcttcgaatccggcaagcccggcctgcgccagggcttccagacattgtgcggtatcgccatcgcgatgataaaagtgcagattttctaacgccgtcagccgggttttgatccccggctgatggcctatccataacaggttttgatggtagctgtcgcgtacctgatgcaagggctgcccttgccagagaacctcgcctgcgtcagggcgagacaaccccgtcagcaaacggagaagcgttgtcttccccgcgccgttgctaccggtgatttgtacccactctcctgcgttcagcgtaaaactcaagccactaaataaggttcgttcatcccgctcacaaagtaactctctggcttcaagcatacccacgcaataaccctgttaaaaacctggctcgacttcacgcatatcgggcagcttgtgcgctatccctttatggcaatcaatacaggtttgcccatctttcaccgcctggtcatgcatcttcgcggcaacgcttttctgggcggttgtatccatatactcgaagttgtgacagttacggcactcctggctgttattgtccttcatgcgccgccactcattctgtgccatcgtcagacgatgagcttcaaatttctgcggcgtgtcaataacgccaaaaattttaccatacagctctttacttgctttgagcttgcgtatcatcttcggcacaaactcgtgcggaacgtgacaatccggacaggtcgcacggacgccgctacggttgttgtagtgcacggaatccatgtattcctgatacaccgtgttgcgcatttcgtggcagctaatgcagaactcttcggtattggctttttccatcccggtgttaaagccaccccagaagacgatgccgccaacaaaaccgatcaacagcagcgtccccagcgccagacggctgggggtacgccaccatttccacaggcgcttaatcagaccaggcttacggtcagaatttcccataataacctcttatttcccgtaacctttacttggggtaaaggtattccccacgattggcgcggtatcggcctgcggtacgtgacattgcagacagaaataacgacgcggagccacttccgcgcccactttgccgtcgctgtccataaagtgagtaggactgatacgcggcgcgccagtggtgcgatagctttcgacaccgtggcactgcaagcagcgattggtattggtcgttacctgataaccttcaacgctatgcgggatcattggcggctgattcacatagttcagcggcatccgatcctgctcttttggcatccgaatggccccttcctgtgtcccggatacttccgggctctggctaaaatcgacgccattagccgcccaaaccgcgccgcttaccaccagggccagcatcgccgtccattgacacagcgctttcttcaggtcatggcttttcatgatttcgctcccgaactccattatgtcaacttttcgctccgctactccatcgtgtagttattgtaaatacatcctcagaacagacatccacgcagcgaccgcacgtcatgcaatcgcggctggtgacctgcaccgggctttgttcatccagcaccggggcacgtagcacatgcggttccgggcaaacatgaaaacaatccatacagcggttacatttctgccgatcggtggccgcaacggtaatcacacctttgctacccagcacgccatacagcgcgccaaccggacaaatgtgcccgcaccagccgtgttcaacgaccagtagatcaaataaaaacagcgcgagaataagcagcgcgccgctgccgaagcccattaccaggctacgccccatcagagaaacggggttgatccattcccaaatgagcgtgccagttaaggcacttcccaccagaatgaccaccaacagcacgtagcgaatgtggcgagggatcgtcgcagactgattgaggtcaaagcgcctgcgtaaccagttcgctaagtcggtaatcgggttcagcgggcagacccagctgcaaaataatcgctttcccgccagggcgtagagcacggtgataatcaccgcaccggtcaacgccaccgtggcaggcagatgaccactggcaagactttgcagcgtcatcagcggatcggtcagcggaacggtgtcgaataacaggctactgctgtagttgccgtgcaagatccacacaccaaaccatggaccgctcaaaaacatccccagcacgaagaactgacaaaggcgacgtaacaccagccaacggtgactgcgccaccagccttttttctccagcgcctcgcgcccggcgtcacgtttacgatttgccattgttcccctccagccagccgttacttagcttttgccattgttcccctccagccagccgaagcggtaatggtgacctaactcccctttcgccagactcagcggtaacaccttgattgccggttgttccagcacgcatactttttcgcacttaccgcaaccggtacaggcgtcgctgtgaaccgtcggcagaaagcgggcgtgcttaccggtacgcgtgttgcgctccagctccagggtgatggcctcatcaattttcgggcattcgcgataacaaacatcgcagcgcagcccctgaaagttgagacagttttcctggtccaccagtaccgccagccccatccgcgcgtcgtcgatgctttcaatctcacgatccagcgcaccgcttgggcacactttggcgcacggaatgtcctcacacatttcgcaaggaatatcccgtgcgacaaaatatggcgtgcccgcgctcagaccagaggccagcgtcgccagttttaaggtgtcgtaagggcaagcctgaacacactgaccgcaacgcacacaggcactggcaaaggcgttctcgtttatggctccgggcgggcgcaaccgcacgccagatgcgcgtgcggtttgctgttgtaaccccagcgccacacccacggcagccagcccgcctgctgtgcgaacgacatcgcgcagaaagcggcggcgaccattttgaggtttcgcactccgggacataatggcttacaccttctccagtttgaccgcgcacttcttgaagtccgtctctttgctgagcggatcggtcgcatccagcgtcagtttgttaaccaactgtgcggcgtcgaagaacggcatgtacaccaggccctgtggcggacggttacgaccgcgcgtttcaacaatgctgatcacttcgccacggcgagaaaccactttcactttgtcgccacggcgcagatcgcgcgctttcgcatccagcgggtgaataaacaggaccgcttccgggaaggcgcggtgcagttctggtacacggcgagtcatactgccggtgtgccagtgctccagaacgcgtccggtagagagccacaggtcgtactcttcatccggtgcttccgccgccggttcgaatggcagtgcgaagatcaccgctttgccatccggtttaccgtagaacttatagccttcgcccgctttcacgtacgggtcgttaccttcgctgtaacgccactgcgtttctttaccgttcaccaccggccagcgcagaccgcgcgctttgtggtagtcatcgaacggtgccagatcgtgaccgtgaccgcgaccaaaccatgcgtactcttcgaacagccctttttgcagatagaagcccagctcgcgggattcatcgttcagctgatcttccgccagttcggataccgggaatttgctcacttccggtgtggcatacagcacttcgtacagcgttttgccacgcagttccggtttcttcgccagcagatcttccggccatacttcttcagttttgaagcggcgggagaactggactaactgccagagatcgcttttcgcttcgcccggtgcctgtacctgttgacgccagaactgagtacggcgttcggcgttaccgtaagcgccctctttctctacccacattgcggtcggcaggatcaagtcggcggccagcgcactgactgtcggatacggatcggagacgatgatgaagttgcgcggatcgcgccagcccggcatacgctcttcattgatgttcggcccggcctgcatgttgttggtacacatggtccagtaaacattcagtttgccgtctttcagcgcacggtcttgtgccaccgcgtgcagaccgattttcgccggaatggtgccgctcgggatattccacttcttctcgcagatatcacggtgtttctcgttggtcaccaccatgtccgcaggcagacggtgagcaaaggtgcccacttcacgcgcagtaccacacgcagaaggttgcccggtcagggagaacggaccgcaacccggctgggaaattttgccggtcagcaggtgcaggttgtagaccaggttgttagcccacacgccacgagtatgctggttgaagcccatcgtccagtaggagatgactttcttgttcggatcggcatacagctgcgccagttgttctaactggtctttcggcacgccggtcatttcggcagttttttccagcgtatactcggcaacgaaggctttgtaatcttcaaagctcatcggttcggaggcgtcagaacccggattcttcgctgctttttccagcggatgggtcggacgtaaaccgtagccgatgtccgtcgcccctttgcgcaggttaacgtgcttgctgaagaagtcctgatttatcgcattgttttgaatgatatagttggcgatgtagttcaggatcaccaggtcagattgcggcgtaaagatgatgccgttatccgccagctcgaagctacgatgctggtaggtagaaagcaccgccacggtgacgttctggttagagagacgacggttagtgatgcggctccagaggatcgggtgcatttccgccatgtttgcgccccacagcacaaacgcgtcagcctgctcgatgtcgtcatagcagcccatcggctcatccataccaaaggtacgcataaagccaactactgcgctcgccatacagtgacgcgcgttcgggtcgatgttgttgctacggaagcccgctttaaacagcttggacgcggcataaccttcccagatagtccactgaccagaaccgaacataccgatgctttccggccctttttctttcagggcggttttgaatttctcttccatcacatcgaaggcctgatcccaggtgattggggtaaattcgccttctttgtcatatttaccgtttttcatacgcagcagcggctgcgtcaaacggtctttaccgtacatgattttgggcaggaaatagcccttaatgcagttcaggccacggttaaccggtgcgtccgggtcgccctgacaggccaccacacgtccctgctgcgttccgaccagaacgccgcaaccagtaccgcagaaacggcacggcgctttatcccatttgatggcttcctgctgaccaacaacggcgcgggcaacgcccggcacgctgagaccggcagccgccgcagcggccgcaacggcgttagctttcataaagctacgacgactgagtttcatggtgtttcctcaccttgctcttcctgctggtgataaaccaggctcaccgccagcacgccctctacgttgcgtacactctcaatggtttggatcagcgtttcgctgtcttctgcttccaccaccacaatcaactgaccgctcggcgcgtcgctgacagcaacttcacagccgggaaaggcgttcagttgggtgctgatgtcactaattcgttcgcttttggcctgcacgaccaggctgcaaacttgccagttagtgtgcatggagatactccgcagttatggcacttaccggacagctggctgcacatgctccacatccgttgcaaagttggctattaagttgcggctggtagatcccggagagcgtcgggcgaaagataattgccattggctcacagctatcctgacagcggcggcattcaacactctgatacgccaggcacgcgtccccgatggtgaactgcaaatcccaggccctggtgtggcgcggagaaaataggctttcggggcaagcctgcgcgcaggcgtaacagaagctgcactcgttatttttgaaattaacgctcggatagccgcccgcgccgcgttgcagaatgttgttttcacaagcattaatacaggcgtcgcagcgggtgcaatgggtcagaaaatgagattcatcaccggaccagggcggacggataccgttactggctttgcgccagcgaccagtgagtatgccccgacgggatgcatcaatcttcacattgaccttccatcattaacgcgctctgaaaattgagagcgaccaaataaaccgcataattaataagccatttttatagccgctaagatattaaaggatgtgtcaaagatgcataccccgatcggggtaaaacctgtagcaggatcaaaagagtggcgggaagcgtggcaaaaacgggcttttgctcacatttcaaatggttataaatatatttatatagcgattgattcaccagagatatttctgctggtttgctctctcattagaatttaacactaaaagagcaggtaaaattgtctgaatgttctttaagttattcataaagcaaattaataaatctgatgaatatgttaaccttcagcgacatcatcggtgaaaacctataaatgaagaaggaaagcaaaaaaatgaagaccattctacctgcagtattgtttgccgctttcgctaccacttccgcctgggcggcagaaagcgtccagccactggaaaaaatcgcgccttatccacaagctgaaaaagggatgaagcgtcaggtgattcagttaaccccgcaagaagatgaatctaccctgaaagtagaactgttaatcggtcagacgctggaagtcgattgcaatttgcatcgtctcggcgggaagctggaaaacaaaacgctggaaggctggggctatgattattatgtctttgataaagtcagttccccggttagtacgatgatggcctgcccggatggcaagaaagagaagaaatttgtcaccgcgtatctgggcgatgctggaatgctgcgttacaacagcaagctgccgatcgtggtgtatacgccagacaatgtagatgtgaagtaccgcgtctggaaggcggaagagaaaattgacaacgcggtagttcgctaaactgccgtgaagtgcggcaccccgtaggtcagacaaggcggtcacgccgcatccgacatccaacgcccgagccggttgcctgatgcgacgctggcgcgtcttatcaggcctacaccgctgtgaagtgcggcaccccgtaggtcagacaaggcggtcacgccgcatccgacatccaacgcccgagccggttgcctgatgcgacgctggcgcgtcttatcaggcctacaccgctgtgaagtgctccaccccgtaggtcggataaggcggttacgccgcatccgacatctaacgcccaagccggttgcctgatgcgacgctggcgcgtcttatcaggcctacaccgctgtgaagtgctccaccccgtaggttggataaggcggttacgccgcatccgacatccaacgtccgagccggttgcctgatgcgacgctggcgcgtcttatcaggcctacaccgctgtgaagtgctccaccccgtaggtcggataaggcggttacgccgcatccgacatctaacgcccaagccggttgcctgatgcgacgctggcgcgtcttatcaggcctacaccgctgtgaagtgctccaccccgtaggttggataaggcggttacgccgcatccaacatctaacgcccgagccggttgcctgatgcgacgctggcgcgtcttatcagcatacgccacatccggcataccatgccggatgtggcgtatcattacaacgcaatatccgccacttctttttgaacgggttgcggtttcaactgcggtttcggcgtactatctgctgcctgcggcttgtcgtagttcaaccccagcacttcgctggtgtactgcaactcgcgttctgttgccgctacatcaccgttcagcttgcgtccataagacggaacgatcgctttcaacgtagcctgccattgcgggctggaaacacgatcgccaaatactttttccagcagattcaacataatcggcgcggcggtactcgcccctgggcttgcccccaggagcgcggcaatggttccttgctggtcactgacgacttcagtacccagacgcagtacgccacctttctcggcatcacgcttgataatctgcacgcgctgccccgcttgccacaaacgccagtcctcttttttcgcctgcggatagtactctttcaacgcttcaaaacgatcctcttcactcaacatcacctgactcaccagatatttcaccagatcgaaattatccagcccgacgtgcatcatcggcatcacgttagaggtggtggtggaactcattagatcccacaaactaccgtttttgaggaatttggtactgaaggtggcaaatggcccaaacagcactacgcgtttaccgtccagaacgcgggtatcgatatgcggaacgctcatcggtggtgcgccaacggatgctttaccgtaaaccttcgccagatggtgattaaccacgtccgggttttcgctaacaaggaactgtccgcccaccgggaaaccggcgtagtctttcgcttccggaatcccgctttcctgtaacagcttcagcgccgcaccgcccgcgccgataaagacaaatttggcacgaatgttctgtgcagtgccatttttcagatcggcaacggtaacggtccaggtgttatcgtcattacgctttagggcgcggacttcgctgctgagttgcaggctgaagttagatttcttctgcaaggaagcaattaactggcgggtgatctcgccgtagttcacatcggtaccaatttccgtacgcgtggctgccactttctgttgcggatcgcgcccttccatcactaacggtgcccactctttgatctgcgcgtgatcttcagagtaacgcataccgcgaaacaggctgctttgttgcaacgcggcgtaacgggcgcgcaggaaattgacgttatcctcgccccagacaaagctcatatgcggaacggtattgataaaactacgcggagtacgcagcacgccgcgctcaacctggtgcgcccagaactggcgggaaatctgaaatgcttcgttaatggcgactgctttttcaatactgatgctgccatcggcgttttgcggggtgtagttcagttccatcagtgcagaatgcccggttccggcgttattccagccgttgctactctcctgcgcgacaccctccaggcgctccaccatggtcatgctccattcaggctccagctcgcgtaaataggtccccaacgtggcgctcataatgccgccgccaatcaacagtacatcagtttcctgctcctcggacgctttcgcttttgccgccatgctaacggcattaagccccacggccatgctgaagagcatggcagtcacttttttcatcttgttaatgccttacttttagtcgctttattgcaggtgagatttgcgcggcatcaacggtaacacttaagtaacaacatttaaataatgtttataaattatattctaattttagaaacattataatttcgttgattaattatagggttattagaaatgaagggatttttagcatattgacctgacggcagcagtccgccaggtcagcgtcgtaatattatgccgtccgggcaacggcatcacggctagcggcatcgcgctcttcgcccgtcagctcgctaagttgcccattgcgcatttccagcaggcggtcggcgtggataaagtaatgatcatcatgactgatagcgaaaatagttttacccatctcctgcatcagcggcagcaacacctgataaaactcacgacggaagtgtggatcctgatccgccgcccattcatccagcaggataatatcgcgttcttctgccagcgccagcaacagcgccacgcgttttttctgccctttacttaacttcaggttaacaatacgcccgttgcttaactcaagcttatgagccattttcagctgcgccagccacttctcaaccagttgcgggttagcgggtttaccctccggccccagcagttgatcaaacagccagacatcggtaaacactgcgctaaacagtttgcgataatcttccggttgttcgccgctgacaggtttgccatccagcaagatttcgccgctttgtggctgatacaagcccgtcaacaacatcgccagcgtgctttttccgctaccgttgccgccaatcagaaacagcagctcgccacgtttgatggtgagattaatcggaccaacggaaaacgcgttatcctgataagcaaacgtcacgttacgcagctccagcgtttgccagttgggaaacgcctgcgggcgcggaaactctgctttgaaaggcgcgagcgcgaatttgttcagcttgttaaacgccacctgcgccgtcagcagcgtcggcaatgcgccaaccgcgctaagcagcggcgtacgcaggaataaaagcgtcaagctataggtcgcggcaacgttggtatcagcccaaccgaggctgttcgccatccagaacaccaggccgattgcgcccagcatcatgatgttactccagttcacggcactaagatggaaggtgtctgcgcgaataatatggtggcgatactcttgcgcatcaggaatgtagaggttgttaaacacatactcggcgcgttcccggttcagagtcagctctttgcgcccttcaagtacagtttgaaaatccgtgtacagcttgtcttcggtttcacgcagggtcgccatatgtttgtacacccgcgccaccagcacaaaaccgccccagatggtgatcgccatccagatagccgttaccagcaacattttgccgctcagcatccacagatacgccgcactaccgatagtgagaatgatcccctgcaccagttccggcagacgcacaaaagcaatggtgatattgcgcacatcgctggttaaccccgccagcaagctggcgctaccgagttgttcaatgcgctcgacgtgagtatccagaatccgcttgataaattcactacgcagtcggtaaacgaagtgatgccccaaagtggtgagcgccagttggcttccgagagtgactgccatcaacagcagcaataatcccagaaactccggcaacaccagcagactggtatccgccgtttcgataaggcgctgattgataaaagcaattaagccaatgcctaatgccgcactggcgaggcttagcgccatcacactgataaatggccagcgatactgccgccagacaagtacaagaagttccatgcagaaaacccggacaatgaattacagcccgcagtttaaacatcttcgcgcgcacagcaataataattcttatttttattcttttttacctgcctgacggaatgtcaggttgtagcggcagtcgatggtgagtggatgaaaccccgctttcaacggttgaataccgtgataaaacagccggctttcaccgccccataccaccacatcgccatgttccaacaacaaacgtttgagcggatcatttcgtttcaggccgccaaattgaaaaatcgcgggtaagcccagagaaacagaaacaattggcgcgcgcagatccggttcgtctttatcctgatgcaggctcagtttcgcgccaggagcgtagcggttgataagacaagcatctggctggaaatctggatagcccgccgccgtagccgcacgttgacataaattatgaaaactctgtggcatggcgggccacggtttatttgtttgcggatcaatggggctatagagataaccttgccgatgggtcgtccagcccagatgcccacagttggtcatcgccacgctcatggtatatcccccgggggtgaccatctggcgaaacgggctctggctggcaacgtcattaatatcgcggatcagttgctccgcagcgttaaaagcaaaacgccgtaaaattaccgcaccagccgccagtggctcttgccacggttcagcatcggcaaacagatccaacattacctctcctcattttcagcttcgcggcgcagcagttgcgctttacggctcacgccccagcggtaaccggaaagtgtgccatcaccacggaccacccgatgacagggtattatgatagccagcttgttggcggcacaggcgctggcaacggcccgtaccgctttcggtttgccgatggcgttagccagttgctgataactgacggtttcaccgcaaggtatcgtgcgcagtgcctgccagacttgttgctgaaaagcagtgccgcgaatgtccagcggtaacgtcagcggcgtatcgcgttgattgaggctggcgatcacttcacgcacatgttgctgaaacatcagatcggcaggcgcgttgtcggcagcgggaaacatctgctgcaactcgctgattagtgtcgcgtcatcatcgcccagcaatatcgcgcaaatcccccgctcgctttctgccaccaggcaacgacccagctcacaatcagccagcgcgtaacgcaccgccagattttcgccaccgtgacggaattgtttagccgtcatgcccagcgtttcgtcagctttgcgatagtaactgctgctgtcggggaatccggcgttaagaatagacgtcgtcacgctctcccctttcgccaggctttcgcgcaaacggcgagcgcgccaggcctgttgccaggctttaggcgtcattccggtagtcgctttaaacaaccgatgtagatgaaatggactcatcgccacctggtcggctaaggcttccagcgttacaggcgtttcctgttccagcagtcgacacgcgtgggtgattttatccaaccgatgttgctgggcattggctttttctggctgacaacgtttgcaggggcgaaagccagcggcgagtgcctcgctggcatttgcgtagaaggagacgttttcccgcaaagcatgtctggcgcggcaagacggacggcaaaagatgcctgtggtacgcacggcgaaaacgaattcgccgtcggcattcgggtcgcgggctaagacagattgccagcgttgatcgtcagttaagcatgtggcttttttcataatcagctccctggttaaggatagcctttaggctgcccggtcaccatcacgcaaaaaccaacaatcttgcgctttaatttttttcgctgacaaggaagcttttaaactgtggactcatccaggttttaaagctatcgccttctttggtgatcatataaaccgccagcccttcccggcgaacaacctctttagctttctccggcccgagtaccatcaagccagtatcccaggcatcggcttccagcgccgtcggagcaatcaccgtcacggataccagattgtgttcgatgggacgcccggtttgcggatcgataacatgggaaagacgtttgccgtccagttcgtaatagttacggtagctgccagaggtgctaatcccatgaccgttgatatccaccacagcctgaaccgcgttttctttatcggttggtttttgaatcgctacccgccacggcaggccttcaccgttcataccacggctgttcagcgcgccgcccacgctcaccagatagcgggaaatcccttcctgctccatcaagcgtgccaaatgatcggccgcatagccttcgccgacggtggagagatcgacatataaatccggcaggtctttttgcagatattgctgatggctctgattgatgaccgtcaggtgctgtaagccggttttggctttcatcgcatcgatctgttcctggctcggaatttgaaccggctgttgttccgggccaaagccccacagattcaccagcggcccgacggttatatccatcgcgccatcggtcttcgcgccaatgcgcaggctggtggtgacgatatcggccatcgcttcacttaccggccacgggcttaaactttggctgtcgttaaagcgcatcagcgcggaatcttttttataggtgctaagcagctgatcgtcggcgtccagttgggtctgaatcttttctttaagttcggcgctgcgtttggcgtcaatgcccgggatgctggcacgccagaaggtacccatagttttgccttcaagaacggtaacttcagtagcgtgggttttggcgggttgtggtttttgatcgcaaccaacaaagaagagcgcggcagccagcagtgccacgcgggtaaagcttatttccatacgtgattatcctcatgcgaacggtcgcaagagtacaccaaaaaactgagtttgtacgctgaaaacaatgaaaaaagggcccgcaggccctttgttcgatatcaatcgagattagaactggtaaaccagacccagagctacgatgttatcagtgttgatgccagcgtcacgagtgaactggttgtcgtccagcaggttgattttgtagtcaacgtaggtggacatgtttttgttgaagtagtaggtagcaccaacatcaacatatttcaggatatcttcgtcgtcgtagccacgacccaggtttttacctttagactgcaggtaagccagggacggacgcagaccgaagtcgaactggtactgagcaacagcttcgaagttctgtgctttgttcgcccaacccagggaacctacgcgagttgcgttgtaggtctgggtgtactgagcagccaggtagatgttgttagcgtcgtatttcagaccaccagtgtaggtttcagcacggtcgccgttaccgatgtaagcagcggtgttctgagcatcagtacgtttggagctggagatcgcaccaccgataccgaaaccttcgtaatcataagtgatagaaccgccgacgccgtcgccgttttgacgcagtgcgtcacgaccgttgttagttacgccactagtaaagccttcaccagatgggttgccgtttttaccctggtactgaacagcaaagttcaggccgtcaaccagaccgaagaagtcagtgttacggtaggtcgcgaagccgttaccacgctgctgcatgaagttgtcagaaccgtaggtgtcaccaccgaattctggcagtacgtcggtccaggaagttacgtcataaacaacgccgtagttacgaccgtagtcgaaagaacccacatcctggaatttcagacctgcgaatgccacacgggtccaggagttgttttcgttttcagcgctgttgccctggatctgatattcccactggccgtaaccggtcagctggtcagtaacctgagtttcacctttgaagccaagacgcatgtaggtctggtcgccatctacatctttgttgtcagagaaatagtgcaggccgtctactttaccgtacagatctaatttgttgccgtctttgttgtaaacttcagcagcgtttgctgcgcctgctaccagcagagctgggaccaggagggacagtactttaactttcatgttattaaccctctgttatatgcctttatttgcttttttatgccactgcatactgattaaccctcattaatcagtcggcaagtccattctccccaaaaatgcagaataatccaacacgaatatgatactaaaacttttaagatgtttcatttatcgctatagatgtttcaaaatgtaaatgcaagggaactttttaagattattgcggaatggcgaaataagcacctaacatcaagcaataataattcaaggttaaaatcaataacttattcttaagtatttgacagcactgaatgtcaaaacaaaaccttcactcgcaactagaataactcccgctatcatcattaactttatttattaccgtcattcatttctgaatgtctgtttacccctatttcaaccggatgcctcgcattcggttttttttacccttctttacacacttttcattattctgtgctaccacagaaaaactataacgcttgttaactatttcacaaataattaacatccgcataatttccagcaatctttgtttatttgcaattatttttgttgggctttttgtaggttatttgtacagcaaaatggcgcttgtacatctatttcccccaatgcaggatgataaatatcacgggagaatagagaatcatcaatcaggtaagagtctggaatttcacactgtaccctttatactgccctatcacttcgcgaagttttaacaggtcataaacacgaatgcgtcagaaagagacaacggccacgacccgctttagtctcctaccggggagcattacccgcttctttttactgttgatcattgtgttactggtgacgatgggtgtaatggtacaaagcgccgttaacgcctggctgaaagataaaagttaccagattgtcgacattacccatgctatccaaaagcgcgtcgataactggcgttacgtgacctggcagatctacgacaacattgccgcgacgacctccccctcctccggcgaaggtttacaagagacgcgcctgaaacaggatgtctactatctggagaaaccacgccgcaaaacggaagcgttaatctttggctctcacgacaacagtacgcttgagatgactcagcggatgtccacttatctggatacattgtggggcgcagaaaatgtaccgtggagcatgtattacctgaatggtcaggataacagtctggtgctgatcagtaccctaccccttaaagatctcacctccggatttaaagaaagcaccgtcagcgacattgttgatagtcgtcgtgcagagatgttgcaacaggccaacgccctcgatgaacgcgaaagcttttctaacatgcgccgcctggcctggcagaacggtcattactttacattgcgtactacctttaaccagccaggacatctggcaacggtcgtggcttttgatctgccgattaatgatttgatcccaccgggtatgccgctggacagtttccgccttgagccagacgcgacggcaacgggaaacaatgataatgagaaagaagggacggatagcgtcagtatccactttaacagtacgaagattgaaatctccagcgcactcaactctaccgatatgcgcctggtctggcaggttccttatggcaccttattgctggatacgttgcaaaacattctgctgccactgctgctgaacatcggtttgctggcgctggcgttatttggctataccacattccgccatttctccagccgcagtacagaaaacgtccccagcacggcggtcaataacgaattgcgcattttacgggcaatcaatgaagagatagtcagtctgctgccgctcggcctgctggttcacgatcaggaaagcaaccgcactgtcataagtaacaaaattgccgatcatttgctgccgcatttgaatctgcaaaacatcaccaccatggcggaacagcatcaggggattattcaggcgacgatcaataacgagctgtatgagatccgcatgttccgcagccaggtcgcgccgcgcacacaaattttcattattcgcgatcaggatcgcgaagtgctggtaaacaagaaactcaagcaggcgcagcgtctgtatgagaaaaaccagcaggggcggatgatctttatgaaaaacattggcgatgcgctgaaagaacccgcacagtccctggcggagagcgcggctaaactcaacgccccggaaagcaaacaactggcgaatcaggcagatgtgctggtgcggctggttgatgaaatacagttagcgaacatgcttgcggatgatagctggaaaagtgagacggtgctgttctccgtgcaggatttaattgatgaagttgtgcctagtgtgttgcctgccatcaagcgtaaaggtctgcaactgctgattaacaatcatctgaaagcacacgatatgcgccgcggcgatcgcgatgccttacgacgtattttgctgctactgatgcaatatgccgtgaccagtacgcaattgggaaaaatcacccttgaggttgatcaggatgagtcctccgaagaccgcctgacgttccgcattctggacacgggagaaggcgtaagtattcatgaaatggataatttgcacttcccgtttatcaaccagacccaaaacgatcgctatggcaaggcggacccgctggcattctggctgagcgatcaactggcacgtaaactgggcggtcatttaaacatcaaaacgcgggatgggcttggtacacgctactctgtgcatatcaaaatgctcgcagctgacccggaagttgaagaggaagaagagcgtttactggatgatgtctgcgtaatggtggatgttactagcgcagaaattcggaatattgtcactcgccagttagaaaattggggtgcaacctgtatcacacccgatgaaagattaattagtcaagattatgatatctttttaacggataatccgtctaatcttactgcctctggcttgcttttaagcgatgatgagtctggcgtacgggaaattgggcctggtcaattgtgcgtcaacttcaatatgagcaacgctatgcaggaagcggtcttacaattaattgaagtgcaactggcgcaggaagaggtgacagaaagccctctgggcggagatgaaaatgcgcaactccatgccagcggctattatgcgctctttgtagacacagtaccggatgatgttaagaggctgtatactgaagcagcaaccagtgactttgctgcgttagcccaaacggctcatcgtcttaaaggcgtatttgccatgctaaatctggtacccggcaagcagttatgtgaaacgctggaacatctgattcgtgagaaggatgttccaggaatagaaaaatacatcagcgacattgacagttatgtcaagagcttgctgtaacaaggtagcctattacatgaacaatatgaacgtaattattgccgatgaccatccgatagtcttgttcggtattcgcaaaagtcttgagcaaattgagtgggtgaatgttgtcggcgaatttgaagactctacagcactgatcaacaacctgccgaaactggatgcgcatgtgttgattaccgatctctccatgcctggcgataagtacggcgatggcattaccttaatcaagtacatcaagcgccatttcccaagcctgagcatcattgttctgactatgaacaacaacccggcgattcttagtgcggtattggatctggatatcgaagggatcgtgctgaaacaaggtgcaccgaccgatctgccgaaagctctcgccgcgctgcagaaagggaagaaatttaccccggaaagcgtttctcgcctgttggaaaaaatcagtgctggtggttacggtgacaagcgtctcagcccaaaagagagtgaagttctgcgcctgtttgcggaaggcttcctggtgaccgagatcgctaaaaagctgaaccgcagtattaaaaccatcagtagccagaagaaatctgcgatgatgaagctgggtgtcgagaacgatatcgccctgctgaattatctctctagtgtgaccttaagtccggcagataaagactaatcacctgtaggccagataagacgcgttagtgtcttatctggcatttgcaccgattgccggatgcggcgtaaacgccttatccggcctacgattcccattatttcaacaaattacattaaagtaggccagataagacgcgtcagcgtcgcatctggcatttgcactgaatgccggatgcggcgtaaacgccttatccgtcttagctatcccggcttttcctgaccctctcggcatataacgtcagcgtctgttttatcacatccagcgttaccggcttgctcaggcagctgtccataccggactccagacaccgctgtttctcttcagccaacgcattagcagttactccgattaccggcaacgtcagtcccaactgacgaatgcgttgcgtcaagcggtaaccatccatatttggcatgttgacgtcgctaagcacgatatcaatatgattcttgctaagtacattaagcgcatcgacgccatcattcgcggttttacattgatagcccaagcttcccaactgatctgccagcaaacgccggttaatcggatgatcatccacgaccagaatcatcatatcgtcattatcgctgaccgctttgtccgtactcggcagagcgttagcaggatcgtcgctctccatctcgatcaaataaatacgcgccaacaatgccggtagctcatgcggagcagccacactgtgtacccactcccctggcgctttctccagcggaataccaatatggcgacgacagaaggtcactaccgctctgccctgccattttttactcactacctcgtcagtgatcaacacatcttcgggagtcggttcctgcccttcgtatgttgtaacgacgatgccgctgcgctgcaaactggtttccaggaactgacagaggctcgcattgcggaccgccagccagcagcgtttaccactcaacccttccacgccttttttctgcgggtactgagcgccgtacaacggaatacgcacggtaaactggctgcccattcccggttcactatctacgctgatatcgccgtccatcatgctgatcagtttttcacaaatcgccagacccagaccggtcccctggaaattacgctgtacgcccgttccgacctggaagaagggatcaaacaagcgcaccacttctttcgccggtatccccacgccggtatcgcgaacacggatagagagataatcgccatccgcgcgaacatgcaaaactatacagccggtatcggtgaattttatggcgttactcaacaggttggagatgacctgctgtaaacgcatcgggtcgccatttaaggccactggcacatccggttcaataaagcagtacaagcctaactgcttgcgtaccaccagcggtaaatagttggcggtgatgtggttcatcacttcacgcggactaaactcacgcggttcgatcttcaactgttcgctttcaatcttgctgaaatcgagaatatcgctgataattttcaacaacaggctggaagagttgttcattgccgtcaccagccgatcgacgcctttcggtaactctttggtttgcaacagatccaggttaccgataatgccatacagcggcgttcgcagctcatgactgacggtggcaaggaacatgcttttactctggctcgcctgttccgctgcttgtgccatctcctgcaagctctcttccatcttcacgcggctagaaacatccaccagcacacaaatggccacgttttcattacgatagcggctatggacgaagctgatttgcagattggtattgttgctggtcaggacatcaacaaaattgacctgctgcccacagataatttgcgtcagtcgttggcggtcctcatgcgtaagcatattgagataggtatgcgccagttcgttacttaaaatattgacgccatcagcggtacgcaaaatgcagatacccactggcgcggaggcgacaatcttgcgattgaactgctcatgttcttccagtcgcagggcgtcgctttccgccggaatgaaaatacgtcgctcgtacatccgtgcgagagtaaacaatgcagctccggcaagcacattcagcaaaattgcgttaaggatcaacatgcgaatgcgttccagcaccttatcaaccggcacgctatacacgatgcttaggctactgggtggcagatttttcttcagcaccagctcccggaacccttccgtatagccaaaccaggagcgttcctgcatccagcgaggatcgcccttaattttactttctggtccggtaaggctaatcagggtatgaccattttcatcaagaatggtaacccccatcggcaacgtacccggtaagaaaaagttctccatccggatggtctgctcgacacccaaaagcgcctgcaaccggttcgccagataaactggcgtcaacgcgtaaaaatacccgacgccagggcgcggaccttcgctgatccagtagaggttactgccgctatcatcttgtggtgcatttcgatatttattgatgcgttcatgcaaagctttcaacgcggtatcgcgttccactggcatatcacgcagaccgaaattggccatgcagaggttatcgctgccgattaaaaatacccggtttagatcgtaagccgcagaaaaattatcgcgccagtagcgcataaaccacgccaaactctccagagaacctcgccaggtgttactcattgcggaacaatcggagtcggcaaacagcggttcaaacgcaggcacatccgcctgcgtttctcgtccacgcggggaaagcacaccgttttctgcgcttaagcgattttcggcgatgtacttcagctctttcatcacatcagaggtgcgttgaataaagcgctgagcctgatcggaactcagattaaattcctgacgaatttcgctttctcgctgatgtaacgcattaacgatgtaaaaaacggaactaaaagcaatcaacagccagagcactaacgccaatgctctgaacatgtagcggctggctttcagggttgtacgaaaagaagcaaggtatttcaaaggggcgaagctccgcctcaggtgaccgatggagtgtggttaaggtagcggtaaaagcgtgttaccgcaatgttctctcttctctggaatatgatacaccgccgagaaatcatcaccttaacctctgataatcgtcatataccggacaagactagtggatttcagcatgcattatatgaagtggatttatccacgccgcttacgcaatcaaatgatcctgatggcaatcctgatggtcattgtcccaacgcttactattggttatatcgtagaaacggaaggacgtagtgcagtcttatctgaaaaagagaaaaaactttctgccgtggtcaacctgcttaatcaggcactaggcgatcgctatgatctctacatcgacttaccacgtgaggagcgtatccgcgcattaaatgcagaacttgcccccattaccgaaaatatcactcacgccttccctggcatcggtgctggttattacaacaaaatgctggatgcgataatcacctacgcgcctagtgcgctatatcagaataatgtcggcgttaccattgccgcagatcaccctggtcgcgaagtgatgcgtacaaatacccctttagtttatagtggcaggcaggtgcgcggcgatattttgaatagtatgctccccattgagcgtaatggtgaaatcctcggctatatctgggccaatgaattaaccgaagatattcgccgccaggcctggaaaatggatgtgaggattatcattgtgctcaccgctggtttgctgataagcctgctgttgattgtccttttctcccgtcgcctgagcgccaatattgatatcatcaccgatggcctcagcactctggcacaaaatattcccactcgattaccacaattgcccggtgaaatggggcaaatcagtcagagtgttaataacctcgcccaggcactgcgtgaaacgcggacacttaacgatctgattattgaaaacgctgccgatggcgtcattgccattgaccgccagggtgatgtaaccaccatgaacccagcagcagaagttatcactggctatcaacgccatgaactggtagggcagccttactccatgttgttcgacaatactcagttctacagtccagtactggatacgctggaacatggcaccgaacatgtggcgctggagatcagttttccaggtcgtgaccgcaccattgaactcagtgtcactaccagtcgtattcataacacgcacggtgaaatgataggtgctttggtgattttctctgatttaactgcccgcaaagaaacccagcgccgcatggcgcaagcagaacgcctcgccacactgggtgagctgatggctggcgtcgcgcatgaagtacgtaatccgttaacggctattcgtggttatgtacagatcttgcgccaacaaaccagtgacccaatacatcaggaatatctgtccgtagtactcaaagaaatcgatagtattaacaaagttattcagcaattgctcgaatttagtcgtccacgccacagtcaatggcaacaagtcagcctcaatgcattggttgaagaaactctggtactggtacaaaccgccggcgtacaagcgcgggtcgacttcataagcgaactggataatgaattaagcccgattaacgccgatcgtgaactgctcaaacaggtactactgaatatcctgatcaatgccgtccaggctatcagcgcacgagggaaaattcgcattcaaacctggcaatacagcgacagtcaacaggccattagcatagaggacaacggctgtggcattgatctcagcctgcaaaaaaagatcttcgatccctttttcaccaccaaagccagtggaaccgggcttggtctggcgttaagtcaacgcatcattaatgcccatcagggtgatattcgcgtcgccagtttgccgggctacggcgcaaccttcacgcttattttaccgatcaacccgcagggaaatcagactgtatgactgctattaatcgcatccttattgtggatgatgaagataatgttcgccgtatgctgagcaccgcttttgcactacaaggattcgaaacacattgtgcgaacaacggacgcacagcattacacctgtttgccgatattcaccctgatgtggtgttgatggatatccgcatgccagagatggacggcatcaaggcactaaaggagatgcgcagccatgagacccggacacccgttattctgatgacggcctatgcggaagtggaaaccgccgtcgaagcgctacgctgcggagccttcgactatgttattaaaccgtttgatctcgatgagttgaatttaatcgttcagcgcgctttacaactccagagtatgaaaaaagagatccgtcatctgcaccaggcactgagcaccagctggcaatgggggcacattctcaccaacagcccggcgatgatggacatctgcaaagacaccgccaaaattgccctttctcaggccagcgtcttgattagcggtgaaagcggcaccgggaaagagttgattgccagagcgattcactacaatagccggcgggcaaaggggccgttcattaaagtcaactgcgcggcgctgccggaaagcttgctcgaaagtgaactgtttggtcatgaaaaaggtgcatttactggtgcacaaaccttgcgtcagggattatttgaacgagccaacgaaggtactctgctcctcgacgaaattggcgaaatgccgctggtactacaagccaaattactacgcattctacaggaacgggaatttgaacggattggcggccatcagaccataaaagttgatatccgcatcattgctgccaccaaccgcgacttgcaggcaatggtaaaagaaggcaccttccgtgaagatctcttttatcgccttaacgttattcatttaatactgccgcctctgcgcgatcgccgggaagatatttccctgttagctaatcactttttgcaaaaattcagtagtgagaatcagcgcgatattatcgacatcgatccgatggcaatgagtctgcttaccgcctggagttggccgggaaatattcgagagctttccaacgttattgaacgcgccgtcgtgatgaatagtggcccgatcattttttctgaggatcttccgccacagattcgtcagccagtctgtaatgctggcgaggtaaaaacagcccctgtcggtgagcgtaatttaaaagaggaaattaaacgcgtcgaaaaacgcatcattatggaagtgctggaacaacaagaaggaaaccgaacccgcactgctttaatgctgggcatcagtcgccgtgcattgatgtataaactccaggaatacggtatcgatccggcggatgtataacaccaaaacttgctatgcagaaatttgcacagtgcgcaattttctgcatagccgctcattctccttataaatccccatccaatttatcccttcatattcaattagttaaataactaaatccaataatctcattctggcactccccttgctattgcctgactgtacccacaacggtgtatgcaagagggataaaaaatgaaaacaaaattgatgacattacaagacgccaccggcttctttcgtgacggcatgaccatcatggtgggcggatttatggggattggcactccatcccgcctggttgaagcattactggaatctggtgttcgcgacctgacattgatagccaatgataccgcgtttgttgataccggcatcggtccgctcatcgtcaatggtcgagtccgcaaagtgattgctagtcatatcggcaccaacccggaaacaggtcggcgcatgatatctggtgagatggacgtcgttctggtgccgcaaggtacgctaatcgagcaaattcgctgtggtggagctggacttggtggttttctcaccccaacgggtgtcggcaccgtcgtagaggaaggcaaacagacactgacactcgacggtaaaacctggctgctcgaacgcccactgcgcgccgacctggcgctaattcgcgctcatcgttgcgacacacttggcaacctgacctatcaacttagcgcccgcaactttaaccccctgatagcccttgcggctgatatcacgctggtagagccagatgaactggtcgaaaccggcgagctgcaacctgaccatattgtcacccctggtgccgttatcgaccacatcatcgttagtcaggagagcaaataatggatgcgaaacaacgtattgcgcgccgtgtggcgcaagagcttcgtgatggtgacatcgttaacttagggatcggtttacccacaatggtcgccaattatttaccggagggtattcatatcactctgcaaagcgaaaacggcttcctcggtttaggcccggtcacgacagcgcatccagatctggtgaacgctggcgggcaaccgtgcggtgttttacccggtgcagccatgtttgatagcgccatgagttttgcgctaatccgtggcggtcatattgatgcctgcgtgctcggcggtttgcaagtagacgaagaagcaaacctcgcgaactgggtagtgcctgggaaaatggtgcccggtatgggtggcgcgatggatctggtgaccgggagccgcaaagtgatcatcgccatggaacattgcgccaaagatggtagtgcaaaaattttgcgccgctgcaccatgccactcactgcgcaacatgcggtgcatatgctggttactgaactggctgtctttcgttttattgacggcaaaatgtggctcaccgaaattgccgacgggtgtgatttagccaccgtgcgtgccaaaacagaagctcggtttgaagtcgccgccgatctgaatacgcaacggggtgatttatgattggtcgcataagccgttttatgacgcgttttgtcagccggtggcttcccgatccactgatctttgccatgttgctgacattgctaacattcgtgatcgcgctttggttaacaccacaaacgccgatcagcatggtgaaaatgtggggtgacggtttctggaacttgctggcgtttggtatgcagatggcgcttatcatcgttaccggtcatgcccttgccagctctgctccggtgaaaagtttgctgcgtactgccgcctccgccgcaaagacgcccgtacagggcgtcatgctggtcactttcttcggtagtgtcgcttgtgtcatcaactggggatttggtttggttgtcggcgcaatgtttgcccgtgaagtcgcccggcgagtccccggttctgattatccgttgctcattgcctgcgcctacattggttttctcacctggggtggcggcttctctggaagtatgcctctgttggctgcaacaccgggcaacccggttgagcatatcgccgggctgatcccggtgggcgatactctgttcagtggttttaacattttcatcactgtggcgttgattgtggtgatgccatttatcacccgcatgatgatgccaaaaccgtctgacgtggtgagtatcgatccaaaactactcatggaagaggctgattttcaaaagcagctaccgaaagatgccccaccatccgagcgactggaagaaagccgcattctgacgttgatcatcggcgcactcggtatcgcttaccttgcgatgtacttcagcgaacatggcttcaacatcaccatcaataccgtcaacctgatgtttatgattgcgggtctgctgctacataaaacgccaatggcttatatgcgtgctatcagcgcggcagcacgcagtactgccggtattctggtgcaattccccttctacgctgggatccaactgatgatggagcattccggtctgggcggactcattaccgaattcttcatcaatgttgcgaacaaagacaccttcccggtaatgaccttttttagttctgcactgattaacttcgccgttccgtctggcggcggtcactgggttattcagggacctttcgtgatacccgcagcccaggcgctgggcgctgatctcggtaaaagcgtaatggcgatcgcctacggcgagcaatggatgaacatggcacaaccattctgggcgctgccagcactggcaatcgccggactcggtgtccgcgacatcatgggctactgcatcactgccctgctcttctccggtgtcattttcgtcattggtttaacgctgttctgacggcacccctacaaacagaaggaatataaaatgaaaaattgtgtcatcgtcagtgcggtacgtactgctatcggtagttttaacggtagtctcgcttccaccagcgccatcgacctgggggcgacagtaattaaagccgccattgaacgtgcaaaaatcgatagtcaacacgttgatgaagtgattatgggtaacgtgttacaagccgggctggggcaaaatccggcgcgtcaggcactgttaaaaagcgggctggcagaaacggtgtgcggattcacggtcaataaagtatgtggtagcggtcttaaaagtgtggcgcttgccgcccaggccattcaggcaggtcaggcgcagagcattgtggcggggggtatggaaaatatgagtttagccccctacttactcgatgcaaaagcacgctctggttatcgtcttggagacggacaggtttatgacgtaatcctgcgcgatggcctgatgtgcgccacccatggttatcatatggggattaccgccgaaaacgtggctaaagagtacggaattacccgtgaaatgcaggatgaactggcgctacatagtcagcgtaaagcggcagccgcaattgagtccggtgcttttacagccgaaatcgtcccggtaaatgttgtcactcgaaagaaaaccttcgtcttcagtcaagacgaattcccgaaagcgaatagtacggctgaagcgttaggtgcattgcgcccggccttcgataaagcaggaacagtcaccgctgggaacgcgtctggtattaacgacggtgctgccgctctggtgattatggaagaatctgcggcgctggcagcaggccttacccccctggctcgcattaaaagttatgccagcggtggcgtgccccccgcattgatgggtatggggccagtacctgccacgcaaaaagcgttacaactggcggggctgcaactggcggatattgatctcattgaggctaatgaagcatttgctgcacagttccttgccgttgggaaaaacctgggctttgattctgagaaagtgaatgtcaacggcggggccatcgcgctcgggcatcctatcggtgccagtggtgctcgtattctggtcacactattacatgccatgcaggcacgcgataaaacgctggggctggcaacactgtgcattggcggcggtcagggaattgcgatggtgattgaacggttgaattaatcaataaaaacacccgatagcgaaagttatcgggtgttttcttgaacatcgacggcgaaggtaaccccattaatcaccagtcaaaacttttcaccagcgtcagctcgccagcattacgcatcggtacaataaatgtttcctgtttctcattgacgcttccttcatcggtgatcagcgtcagttgggcggtggttaattccgtttcgctgcgcccaccatagtagttgatatacacctgatagcgcccgtgaattggcgcgggcatggcgaaaatctcgggtccgtaccccgtcgtgacatccatatccagtgcaccactgtttttcagcacggtgttaccgtaccaggcgtgttcgccatcgggcgtaacaacgtgaaggtcgaggtcggtattgtccgtatcccagctgagaaccagccgtaaacgtgcacgaatcgttcctgtacccggcgtactgtaaaactgcattttttgtcggctttgcccatccgggctgatgacctgcacgctgttgctgccttcagtgaaaatataagggcgtgcaaaactaccatcggattcaattctctgcggcatactggcaccgttgaccaccagccggccctgctgaactttacccgccgcagcataattctttattttgccgcggatctgcgcactgatattttgatcatctgccatgttgacggagctcgccgggtaattgatgctttgactaaaactggcatcttcgccctctgccggatgccagccactgagcggtgcatcaatctcgacttcctgcacaccttcactgtgagcgacagggctaagcgccaccagtaacaacggaagaaaaatctttcgcatagcattagtccattaataattgtcgggtcagcgtttcgatatagttctcatcaagcccggtgggataaccatcaaaggccaggtgcagatactcatgggttaaatccagccgatcctgaagcgtaaagaagttacgaataaacagccgtttctgctgccgatcggtataggggaaaccactgactaaacggcaaaccgcaaacacgtctggttcgttgtaccccgtctcagcttgtaatatacgccgccactgcggcatttttttcgccagccaggctttcgctttgggtaataactggcaggtactgcgtggcgctccccagcggctaagactgttgtcgggataagcaaacgcgagtatctgatcgtaacgctctccctgccccgcctgggccgtggcttgccgccaggaaagtgtcccttcggtagcgcgactgccatgataatgaaccggatcgcctgcatagatgagatcctgcgtccaggcggtcatcgttcgcgcccccgtggtcgctgggctagcagaaacacgctgcgtggcgctgctgtcggggatggtcaggcaatcgccttcccgattggcgttttgctgtaaaaaagtgcgaatcgccacggtcatggctttcgctgcctcagggggcgtacttttcgcctcgcgatccagaactctggcaacgtactcttcacgatcgagatggctctgcaatttcagtttgcccttttcgctcagtaaggtcgtctcaccgtggctgacaaacgtaatgtggttaccattagtaaacgtcacacgatagcgcccattaagtacgccgggatttactgccgtcgtactcttttccgctgtgattttcttcagcggatagcgggcaaacagctccacctctacacattgcccactggcaacctgcgtcggcactggcaaaacccgattaagcaccgtcgcataacgggttagtaccgttttgctggtgccactgccagtaacccacagcggtgtaccatcggttaaccagccagcaaaaccaccctgacggatttcctgtttatcatcggcaaaccagctccaggttttcacccgtacccgactaccgagcatggatgcgacaccgattttcgcctcgtccagcaccacatccagtaagacttcctgagctttgttttgcgcgggtaacgtcgctaaactatcaagcaggcttttaaccgttacgctggtttctggcttcagcgtagtcagagacgctaaccacgcaggtgcctgacgctgttgccagtattgcccccacacatctgcgccaatatgcaaccgctgcggcgcaaaatagagcccacaggaacgtaccagcgcggtatcgcgcgttatgctctccccagcctgacaacaataaacctcttccggggagtttccgcgacactggtagggctgctccggttgatgggtatcctccagccaggcgtaaacatacagtttccacaaactccctaacggcgtggtgaggctgtcaggtaatgcactgactttggtcacgccactactgctcagctgatacagttgatcgtgctgcgcaccgcgcagcaccagttgtaacggcgtctcctccgcaagtgttggcagagtaaccaacgccaatagccagacgattcagcgccagttcacttatttcacctgcatcccggtccattcactccctgccgcaacactttgctgcgcaggtgcataggaacgcacataacgagcaggaggcagaacgaattgccctttttgcgagaagcgcagcaaatggcggaaagtgaccgttcccgtcagttctttcaccggcaccatataggccagttcgcccatttcatttcgcgctttttccagcaattgcccctgctgtttcgcggcgttgggtttattgaccgaaatgccccatgttgtgcgctcaacgtcggctcccggtggcagcggtacttccacctgaccgtagcgcagaactgcatcctgctcgctggtaagcgtgatttcatcgagatacagcgcatcgctgtcaatctcattgctggtcaccggttgcagaataaagctcatctcttcttcaccagggataagccgatacaactggcgttcaacggtcaccggaatgttactttgttgagccatttttgccggctcacgtcagcggacctgcacattttgcggcgataattcgtcaccaaaagagagaatgtccggcacgccctgaccaacccaacgccagtcttcgccccctccagttaacttatgtttagcccatgcgcccgcaggcgcaggcaaaacaactggaggcattgtcgccatatatttcgccagccagttcatggccagcgcgcgctcaatagtggattgctcagcggtcaaaccacttaaaatagcggccgtctgggtagcgtcgccaccgctattaagcagcacaaccgtgtgcgccagcggctgattgctgtttgccgctttatcccacgcatattgctgaacctgtggcatcaccgtggacttcaactgcgcttttttcagcaacgtcatggttaagacgtttgccaccgcatctgccagtggagactccggtgtatcgaggatcaggctatcattgatatcgcgggtgtcttcctcagagaaatcttcagttttagttccgcgccgggcgatagcttcatccaaccctttcaacaacgttttgcacggcaaattcatctcctgcgcccatgccagcaccagcgcccgatgcaataacggcatgttatctgcctgctccgcgtagctgtcgagcatatgctgccagtattccggttgttgcgttacgccgatcgcctggctggcctgccagtcggcgtaccatgcccatgccgtaaggaaggcgtcaccattgccatcttcaccccaccaggtaaagcgcgctccgggccccgccagttgcatcagccgcagacggttatcctgaatcatctgacgaatgtcgttagcggcggcactttgatgatcggcaagcgaacgccaggcgagactgagcgggatcagacggctaccggtgttgattacgccaccccacggttcatcgactaacgcatcaagattgttgcggaaaatctcctgcggcgtttcactactttgtagccggatattgctcgcctgctcgggcaacatcagcgcgttatcgccaccaccgagcatgacatttttctgctgttcaacgggccagctgttatccacaaaagacagttttgtgctaatgctgtcctgcacttgcccattttgttgcagttctgcacttaacaagccagattgctgaatattctgcgtcagcgaaatataattcgcccctttgtgcagcgtcagcgtctggcgcatctcagcgcctgcaaatttagtcaccagcgccaccggttcgttatcctgctgactgaagataaatagtcctgccgccggtttgtcgcccacgcgatacaccgttggcatactccacttcatgtagagatttttttccgaacgcagataagcacgcccctgcccgaccagcccgtcgccgttcatcccacgcgcggtgatacgccagcgggttaacgaatcaggcatcaggaacgtgaaatacgctttgccttgtttatcggttgtgagtgacggcatccatgccgcggtatccacctcttcacgccgtggacgttcaagcatttttactcgccgctcgctgcggttagttgcgccaggcgcaaccggctcgctggagagcgcctggtcgtagctgataaacgacagactggagctggtacgcacattgttacgccccagcggatagaaaaatttgccgatattcggcgcgatttctggttgcagcgcgtagatcatttcatcgaccacgcctaccgttagctgcgcagaaacaggtttacctttcagcgacgaggttaattcgacattgaccagttcaccaggctggtaatgggttttgtccgttttcacccggatatccagctggggaacggcaactttgatcccggcgttctgaaaactgtactgaccgttacgggtatacagcaccgaaaaagtgatgttaggcgcaaaggaattgctcactggaacccgggcttcatactgggtatcgtttaaacgttgtagcgttagccagtttgccggatgcgaaagcagcgactgctgttccacgcgatcgcgttccagcgtcaataatgcttcatcaattggctccggaaaggtaatcagcatcttcgcggtttcgcctggctggtacagcgttttatccgccacgatatctaccgtaccagtatgcgccgtgctgcccttaccgctgacggcatgacttaacccagcgagaattaagccgtctttatcgcgtaatgtcagattgtagttgccaggtttagcgaaattgacggtaaaggatttgccgcctgacggtagctctccgctatggctcgtgcggtcttcgagacgcaaccattcatacgtaacaggaacctgttttgaagattccagcgcggcataacggaacacaaccgactcgccgctattactgtattgtgcggcagtacttaatgagtaatgcgccagaccgcgttcaatgaggatctctttggtggtggtgacgcgatacgccgcgccgtcactggcggagacggttaacaaatagcggctcggtttatcggcggcggggagatttaacgccacatgaccgctggcgtcggacaccgtttcgctgccttccagcgacacggggaaacgtccggcataacgcaaatcgttaccgaccattgataattgctgagcgcgcaaacttaactgcacgcgggcattttttaccggctcgccatccgggtagagcagttgcagtttgccgctgaccgcttcgccagttttgaactcttttttggcgagagctaaaccaatctcgaaatgtggcttgatgtagtttgccacgcgaaaactgctgctatagacctgattgcggtaagcaagacgtaactcataacctccggctacgacattttctggcaggcggaaacttccctgcccgccattgcgcgcatccagcgtgacattgacggtttgcaacagactgccgttggcgtccagcaccgaaagcttcgccggggcgctgacgatgggggatgaatgcaacggatcgtggaactcgcggccgatcactttaacatcgacacgatcgcctgcgcgatatagcgggcgatcggtaaaaatatacaagcgggtgttgtagatttcgctttcgtagaagaagttctcggagacaaaaacgccgccttcagcatccttacccagaatgtatgaacgttctggcgatatatgttgtaactgcaaggtaccgctgtcatcggtcacaccgcgggtcatcacgccaagaccgtcagtccacaagatctctgagccgggcttcgcttcaccctgttttttacccgcggtccacaccagaagctctttgcctgacactttgctaagcgccacggtatcggaaacaaacaccaccgtcgtcgcccgatacccaccaaccatcgcctcgacgaggtacagtcccggctcttgttggccgagaggaatataaatgttacccggctgcggcgagatgaaattgctggatgcgccttccagttttaccccttgctgcggctcgaacggtttagcctgccatagtggataacggaactgtttcaccaggggatattttttcagcggggaaaactggttgttctgtacataacgggaaggtttaataatggcattgccgagctgtaattcgggtaacgcctgagtcacattctgccgtgactgagaagagaaagtacgctgcatcacgcggcgagatttgccgtaccagttatcccacagccaggttagcgtattgttcagcccgtcgcccagatattgcggttgcaccacaatgcgatgcaggtttttctgctggcgcaaaaatgccatcgggtcaggaatacgatacaggcgaacgtccacgccgccgtactcttccatctgatagcgccgataatcacgccccggcgcttccagtcgcactttcgcctcttcactgctgctaaaactgctgtcagcaagcaaaaagaatgttcccccggcaggcggcgcatagttgctggaaggaagcgaatcatcagcattagcaagccctgttcccacaagagacagggacaagcacgctgttatcgcgccagaaaatttaaacgataaatgccaatgaaattgggattggaatcgttgggtatccatcgggtgtccttccatgtcataagttgttgcagactgactgcgcgcattccgttgtcagttttcgtggcgcttccggtgtggtagatgacgtaacgccccatccagaccattaagtgctgggcatcgccctgatcgaaaaaaatcatatcgccaggcagcgcctggtttatgtcctggccaataaactggctgttgtactgaatcaaattaatcgcggtcacataggggccggttttcccgttcccctgattccagttttgcgccagttgacgctgttcaggtgttagcgtcatctctggcggcaaatactggctagataaaccgttactttttagccatttactgtcgtgaactttcagcgtctcgttcgccgcaaatcgcaccaggcccgcacaatcctgctgataccagcgtggacttggcccctggcggagctgttcttgtgcaatgcgtacaaaccaggcgcgaaacagcccggattgttcgacattcagcatttcgctatgggcaacaacacaacacagccagcaaatcagcgccagcagcccgtgcctcatagcggctgccaggttatgggtagccactgccaggcggcaccgggttccatctgggccagcttcatgacataacgcggttgttgagataaagcgtccagcttcggcattaataaagtttgtgcggcgttataaaaaaccggttcgagattcttcggcagactggtcaacgtttcgttacgcagcagtttcgctattccttgtggattgatatagagcggaacgatgccatcagtgggtattacatccaccattgccgggcgggttttattcagtgtttgcagcgcgttattaaccagcgtgtcatcgagggagaaaagcagcgttttgttttgcatcgccaggctcacacggaaaaaataatcgctcattaattgatcgggttgcgccgcctgcgctttcggatactggccgtatcgggaactcacttcgcgacgccagatttgcgcttcgccctgctgagtctggcttaccggcaaaacaccttctggcgctttgctttcgtgcgcaccaatattttgcgtaaacagtttccctggcaattgcgcctgttcggcagtgccatcaaactgaccgacaaacagcggggtttgcaatttactgtcttcataccagcacagccccgcggcaccgtctaacgccccattcagcttgtcgttttcctggctgatgtggctaagcatctcttcggcaataccgtgactatacggcaccgccacacagaagctggctccggcaggcatactgttccataccggcgtaaaatcgaaactggcatctacgctggcggattcatcatttaacgccacaaaactgtgccagccgtcgttacccatttcgaagcgtacgccagcaaaagaaggcattaaccgctggtagccaaaccccagccacctggcgctgactacgatgcgctggcgtactggcgttttttcggcagtacgctcttccaggccaaagcttgcttgccagcgttttttgccgctcaacaaatcacctgcgatcgccgtggcttcggtatcctgctgatcatctttaaacaacatatccgtgctggaaaacaccagcatcttgtcctgataagtcgcgaacatcagggcgttattgccgttatagcgcaactgataaacaggaacagtttcactatttatcttgatgctactgatttccgttttgcttaactggctgtcgctggtagcggcaaacaacaatggctccagcagtttgcttaaaccactgcgctggatcagcaccatataatgactaagatggccttgtttatcgtgccacagcgctgcctgcgcgggctgatctaagagactgctaaagagcttatctttcagcgtgagatcgtgttcatagacaatacgacgaatgctgccttcaatgcccagacgatcggcatgattctgataatagaaaacgaaatcttcgctcagaacatcgtggagaaacggaatggtgaggagatctttgggaagctggctcagagagtcgctgtcgagaaagaggtccggctcattgagatcgatttgcagattgttgtgcaccaccagcgggctcaacgttttttctggcccactgccagcatattgcaacgcccagacgccagcggaaagcagtgctattgcgccaaaacctacaagaccatagaaccgccagcctttcgccttttttcaccactcattgccacattccttgtgtatagccagccattttttacgggcacagccaaactttaccgtgccctaatacgacaaaagcccagactttgcagcctggacttttcaattcaaacaagggagatagctcccttttggcatgaagaagtaaaattattcttcttctggctcgtcgtcaacgtccacttccggagcgatttcatcgtccccttccgcggcactgccgtcgatggtatccagatcttcctcgtcaaccggttcagcaacacgttgcagacccactacgttttcatcttccgcagtacggatgaggatcacgccctgggtgttacggcccacgatgctgatttcgctaacgcgagtacgtaccagcgtaccggcatcggtgatcatcatgatctggtcgcagtcatctacctgtaccgcgccaacaactaaaccgttacgttcggtaaccttgatggagataacccctttcgtcgcacggctcttggttgggtattccgccactgcggtacgtttaccgtaaccgttttgcgttgcggtgaggattgcgccatcgccacgaggcacgatcagagagacgactttatcgccttcacctaagcgaataccgcgaacaccggtggtgttgcagcccatcgcacggacagaagactctttaaagcgcaccactttaccttcagcggagaacagcattacttcgtcttcgccgctggtcaggtcaacgccgatcagctcatcgccgtcaaccagtttgatcgccactttaccggcggtacgcagacggttgaactcggtgaggacagttttcttcacggtaccgttagcggtcgccatgaagactttcacgccttcttcaaactcggtcactggcaggatcgcagtgatacgttcgtcctgctccagcggcagcaggttgacgatcggacgaccgcgcgcgccacgagtggcttccggcaactgataaactttcatgctatagacgcgaccacggctggagaagcacagaatatggtcgtgagtgttcgccaccagcagtcggtcgataaagtcttcttctttaatacgtgcggcagatttacctttcccgccacgacgctgcgcttcgtattcagaaagcggctgatacttaacgtagccctggtgagagagcgtcacgaccacatcttcctgggtgatcagatcttccaggttgatgtctgcgctgttggcggtgatttcagtacgacgtttgtcaccgaactgttcacgaaccagctccagctcttcacggatcacttccatcagacgatcggcgctaccaagaatacgcaacagttccgcgatctgatccagcagctctttgtattcgtcgagcagtttttcgtgctcaagaccggtcagtttctgcaaacgcagatccagaatcgcctgagcttgctgttcggtcaggtagtacagaccatcacgcacgccgaactctggctccagccattccggacgcgcagcatcgtcgccagcacgttcgagcatcgcggcaacgttgcccagctgccacggattagcaaccagcgcagttttcgcttctgcaggcgtcggcgcatgacggatcagttcgatgatcgggtcgatgttcgccagcgccacggctaatgcttcaaggatatgagcacgatcgcgagctttacgcagttcgaaaatagtacgacgggtcaccacttcacggcggtgacgaacaaacgccgcgatgatgtctttcaggttcatgatcttcggctgaccatggtgcaatgccaccatgttgataccgaaagaaacctgcaactgggtctgggagtagaggttgttgagcacaacttcaccgaccgcatcgcgtttcacttcaatcacgatgcgcataccgtctttgtcagactcgtcacgcagcgcgctgatgccttccacgcgtttttcttttaccagttccgcaatcttctcgatcaggcgcgctttgtttacctgatacggaatttcgtggacgataatggtttcacgaccggttttggcgtcaacttccacttctgcgcgagcgcggatatacaccttgccgcgaccggtacggtaagcttcttcaataccgcgacgaccgttaatgattgccgccgtcgggaagtccggccccgggatgtgttccatcagcccttcaatgctgatgtcttcatcatcaatatacgccagacaaccgttgatgacttccgtcaggttgtgcggcgggatgttggttgccatacctacggcgataccggaagaaccgttcaccagcaggttaggaattttggttggcatgacgtccggaattttttccgtgccgtcatagttatcaacgaaatcgaccgtctctttttcgagatcggccatcagttcatgggcaattttcgccagacggatttccgtataacgcattgccgccgcagagtcgccgtcgatagaaccgaagttaccctgaccgtctaccagcatataacgcaggctgaatggctgcgccatgcggacgatcgtgtcatagaccgcgctgtcaccatggggatggtatttaccgattacgtcaccaacgacacgggcagattttttataggctttgttccagtcattgcctagtacgttcatggcgtaaagtacgcgacggtgtaccggcttcaggccatctcggacatctggcagcgcacggccaacaatgacgctcatcgcataatccagataggagctcttcagctcttcctcaatgttgaccggtgtaatttctctcgcaaggtcgctcatctaaccgctatccctctactgtatcccggattcaaaggtcgcaaattataacacagccgcgcagtttgaggtaaacctatacgctttattcacatccaatgcctgatatactcgtttgtcttgccaattacggagtagaagtgccaatgaatgccgaaaaaagcccggtaaaccataacgtagaccacgaagagatcgctaaatttgaagccgtcgcctcccgctggtgggatctggaaggtgagttcaaaccgctgcaccgcattaacccgctgcgtctgggctatattgccgagcgtgctggcggtttatttggcaaaaaggtgctcgatgtcggttgtggcggcggcattctggccgagagtatggcgcgcgaaggcgcgacggtgaccggtctggatatgggctttgagccattgcaggtggcaaaactgcacgcactggaaagcggcattcaggtggattacgtgcaggaaaccgtggaagagcacgcggcaaaacatgccgggcagtatgatgtggtgacctgcatggagatgctggagcacgtccccgatccgcagagtgtggtcagagcctgtgcgcaactggtgaaaccaggcggcgatgtctttttcagcacacttaaccgcaacggcaagagttggctgatggcggtggttggtgcggaatatattttgcgcatggtgcccaaaggcacgcatgatgtgaagaagtttattaaaccggcagaattgctgggctgggtggatcagaccagtttaaaagagcggcatatcactgggctgcattacaacccgatcactaatacttttaaactcggccccggcgtggatgtgaactatatgctgcacacgcagaataagtgaggttgatgtttggccgcgccaatgcctgatgcgacgcttgccgcgtcttatcaggcctacaaatgctccccgtaggccggataaggcgtttacgccgcatccggcaaccgtgccgactagacagtgattaccatttcaccgtcatgctcaaaaaccctgccgtctgggcaaaatcatcactccctttctgccacgccacgctgccgcgcagggacactcgctgactgatattgcccgtgactcccacttttatttcaccccgttgcttcaccgcatcgtcactgatagtgctgccatcctcttcaatttccgtgctatggggatcgtgataataattcagatctaatgttggtatgacatgaacagcggtacgccattcgctgtgtaaacccagccgcgtctgaatatcatcaccctggctttgactcacgcgcgcacggttagcggcggtaaaatcatcctgctgcacgccctgataaatcacctgcgcctgcggttcaatcaccacaccacgccccggtaaccactgataccccgcctccaggctggcgataatcccgctgctgtggtaatgatctgtgccatcttcttgttcggaaacatcattgctaaaccacgcgtattgcagccagctatccagccaggccccttgcttctgattaccgtgctgaaaccagctacttgtcagcccaacggcataaccgtggttctggttatcggcgcgagttccggtcatattgctgcggctgtcgccctggttatcgctgtagccaccaacaatcccaagcatccactcgccatccgtgccccagcgcccgctaaacagatcgccgctaagttgcaccgtagaagtgtcttcatgttgagccagttgccccgctgctgtgtaatgataatctccgccgataacacgtaaattcagcgtctgaccatcgccacctgcgtgatcgcgtcgctccatcataaacgcctgatttgccgcccgcaggttattaagataaccgccaactttggcattcaacaccggctggtaagcaggcgtaggttccgggtcgggtgttggatcaggatccggcgtgggatcaggatcgggagtcgggtctggatcaggtgggcttggcggcgttacttcttggcttcgcagataccagtcgttgttatcttccaccagcgtgtagtcatacgctcccatattgacgtagccgctgcctgccagactgaactgcgcattgttttgaaactgcgtgggatcagctgcgaaatcaaccactttaatgcctgtgcttgtcggctcaccaatccctgtaatggagttaaccaccacagttgtgttgccagcagtattaccgttcatcaccaattgatcgcttacgctgtcatcgccgtttaattcgctatcgagcagtagcgtaccgccgccggtataatcaccgtttaccgtcagcgtatcgccagcgacgccattttgcaggctaaccgcaccggacgtattggtcagattgccattaaccgtcacgttggaaagataagtcaggctgtcagtttcaaggttggtattaagctcacctgtcaacgtcacaccatcggtggcattcaccagcgtcccatcgccgttaaatagactggcattaagggcgacggaagtatcctgcccggtcaggcgcaaaaccgtaccatcgctgatgtcgatagtgccgctggaaatagcatcaatactctgaatatcctgatccgcgccagtaacgaacgttgccccatcaccaacccacagactgctagcataaggaaggatatcagcaacatcacctttcagggtgccttcttcgacacgtaccgcgctctgcgttgtaccgctggcggtcagctccagtgtaccagcccccgttttagtcaatgtactaccctcatcctgatgctgcccgctgctgtcagccatcagtgcgccccactgcgtgtctacccccgcatcaactgccacttcaccgtcggcgcgcatttcaatatcacgtccgtggcctgccgcatcactacgcgtgtcaacgtcggaggtaatctccatcacgctttcttgttgcttatcggtaaagataacctggcggttatagtgggtatctccaagctggctgttgtcgctcaccatcagcgtaccggaggcgatttgtgttgtgcccaaataactattattgtttgccagacttacctgcccgtcgctcgcatcgaccaccacgtagacgccatctttcccgtcgccgccgatatgcaaattgtcgccacctgcaagatctaccacatcctgactgccgataaccgttccgctgctgccactgacttcaaggccatcgttgtaacttgtgccgctctgccaggtggagaaatcagagagatcgagcacaccgccgtttaacacgatgctctgcggatcgtcctggagagcggtaagatctgccgcgtcgccttccaggctaagcaccgcaccatcatcaacgactatatcgccggttagcgccatgctctgcgcccctgccagcacgtagctgccgttttgcgcaatggtgagctgaccagcaccttcgatgatgccagcaaaactgccctgattaacagtaacgttgccaccagcatcgatatttaaagtgccattctgaaagcccgtcaatgcgtgcacaaaagtttgttgggtgctgccaacgtttagctcagcctgattctgatactgatcaatactccctatcgtcagaccgtagcagtcttgcggatcgtcctggcaatgcgtatcgccgacattcatcagggagttgctgcggcccagggtaacttcaccgttttcaatctgcatctcaccagtaaagtcattgttatctgcattaagtaccagatcgccggaacctgttttggtgattaacccggtaccagcaatagagtcaacagctccgtcattctctgtattgccaataaccagcgtttttccgtcggcaatatcaaaggtaacttcacttaagccgagatacataaagccacccgccgcagaggaaggaccatctccatagcctgctgcgctattgttctcatcgactaacacgcctccgttctggctgtagctgtcatcaacagaaatatcaataagatagggagccgtcacgctattggtatatatcgccccgccataaccttcggcagtgttatttgtaaaggcagtgttatttactatcgtataaccactaggatgcttgctgtcgctattattatcggtaacatcgattgccccgccatcgccatcactgtaacttgtacttgtatatgcctggttgttatcaaaaataacatcacttaaataaacgtcattattaatggtataaattgcgccacctttgccatcattagcgatgttattgcgaaacatggcgttagtgacacgtaaatcgacggcaccagtatcgttagtaccagaagaatagattgcgccaccatagccgcctgcgacgttaccggaaaaaataacatcagtaagattcagcgtactgttttctttagcaaatatggccccgccgttattatattctcctgtaacggtgttattggcaaacagagtcattccagtttcattttctggtaatagactaaattccgctccttgttgcaaaaatacggccccaccgctggcgttattggtcatatcgctaaaaaccagccattgcccatcagcgatactccagtcctgcgtaatgccactaaggctttgcctgctggcctgacaactcgctttgacatcatatccctggcaactatcagtgaccgccgcgacaccgttagcagagaaaagagatgcaatcatactcgggagtaaagataaatactccttgcgtagaaagataatccgcatattaatctaaccatcattttctataagacggcgtatttaatcgcattatacgatatggaatatctttcttttgtaaattgttcaacccggtgcaatggctattttgttattatttgatgaataatatcagtgcgtcataattcaagttaataaccttcagggatatcagttatatttaaactaaattaaagtcatgaataattttcttataatataaggtaaattaacaaaatggcttagcatttaacaataaccgaatagaaaacaaccatttcgccatcaacaatctcttacattcgcttatatattgaccacaactgatacatcagattatgtgatgactcgtgcttagatcaatttttgcaatcattagcaaaaagattaataagccatctatatcaatttatctaacctattatgccgttcaagaaatcgccgaacagttatttttaacaaatttttctcttcccattgactttcccggacaccttgtctgacctaaggtgcgcgaaagccactttttccttcctgagttatccacaaagttatgcacttgcaagagggtcattttcacactatcttgcagtgaatcccaaacataccccctatatatagtgttctaagcagcttcccgtactacaggtagtctgcatgaaactattgcggaaagaattccaaaaacaggtacgacatacatgaatcagaatctgctggtgacaaagcgcgacggtagcacagagcgcatcaatctcgacaaaatccatcgcgttctggattgggcggcagaaggactgcataacgttagcatttcccaggtcgagctgcgctcccacattcagttttatgacggtatcaagacctctgacatccacgaaaccattatcaaggctgccgcagacctgatctcccgtgatgcgccggattatcagtatctcgccgcgcgcctggcgatcttccacctgcgtaaaaaagcctacggccagtttgagccgcctgcgctgtacgaccacgtggtgaaaatggtcgagatgggcaaatacgataatcatctgctggaagactacacggaagaagagttcaagcagatggacacctttatcgatcacgaccgtgatatgaccttctcttatgctgccgttaagcagctggaaggcaaatatctggtacagaaccgcgtgaccggcgaaatctatgagagcgcccagttcctttatattctagttgccgcgtgcttgttcagcaactacccgcgtgaaacgcgcctgcaatatgtgaagcgtttttacgacgcggtttccacatttaaaattagcctgccgacgccaatcatgtccggcgtgcgtaccccgactcgtcagttcagctcctgcgtactgatcgagtgcggtgacagcctggattccatcaacgccacctccagcgcgattgttaaatacgtttcccagcgtgccgggatcggcatcaacgccgggcgtattcgtgcgctgggtagcccgattcgcggtggtgaagcgttccataccggctgcattccgttctacaaacatttccagacagcggtgaaatcctgctctcagggcggtgtgcgcggcggtgcggcaacgctgttctacccgatgtggcatctggaagtggaaagcctgctggtgttgaaaaacaaccgtggtgtggaaggcaaccgcgtgcgtcatatggactacggggtacaaatcaacaaactgatgtatacccgtctgctgaaaggtgaagatatcaccctgttcagcccgtccgacgtaccggggctgtacgacgcgttcttcgccgatcaggaagagtttgaacgtctgtataccaaatatgagaaagacgacagcatccgcaagcagcgtgtgaaagccgttgagctgttcagcctgatgatgcaggaacgtgcgtctaccggtcgtatctatattcagaacgttgaccactgcaatacccatagcccgtttgatccggccatcgcgccagtgcgtcagtctaacctgtgcctggagatagccctgccgaccaaaccgctgaacgacgtcaacgacgagaacggtgaaatcgcgctgtgtacgctgtctgctttcaacctgggcgcaattaataacctggatgaactggaagagctggcaattctggcggttcgtgcacttgacgcgctgctggattatcaggattacccgatcccggccgccaaacgtggagcgatgggtcgtcgtacgctgggtattggtgtgatcaacttcgcttactacctggcgaagcacggtaaacgctactccgacggcagcgccaacaacctgacgcataaaaccttcgaagccattcagtattacctgctgaaagcctctaatgagctggcgaaagagcaaggcgcgtgcccgtggtttaacgaaaccacttacgcgaaagggatcctgccgatcgatacctataagaaagatctggataccatcgctaatgagccgctgcattacgactgggaagctctgcgtgagagtatcaaaacgcacggtctgcgtaactccacgctttctgctctgatgccgtccgagacttctagccagatctctaacgccactaacggtattgaaccgccgcgcggttacgtcagcatcaaagcgagcaaagacggtattttgcgccaggtggtgccggactacgagcacctgcacgacgcctatgagctgctgtgggaaatgccgggtaacgatggttatctgcaactggtgggtatcatgcagaaatttatcgatcagagcatctctgccaacaccaactacgatccgagtcgcttcccgagtggaaaagtgccgatgcagcagttgctgaaagacctgctcaccgcctacaaattcggggtcaaaacactgtattatcagaacacccgtgacggcgctgaagacgcacaagacgatctggtgccgagtatccaggacgatggctgcgaaagcggcgcatgtaagatctgatattgagatgccggatgcggcgtaaacgccttatccggcctacggctcggtttgtaggcctgataagacgcgccagcgtcgcatcaggctccgggtgccggatgcagcgtgaacgccttatccggcctacggctcggatttgtaggcctgataagacgcgccagcgtcgcatcaggcacaggatgcggcgtaaaatgccttatccggcattaaactcccaacaggacacactcatggcatataccacctttagtcagacgaaaaatgatcagctcaaagaaccgatgttctttggtcagccggtcaacgtggctcgctacgatcagcaaaaatatgacatcttcgaaaagctgatcgaaaagcagctctctttcttctggcgtccggaagaagttgacgtctcccgcgaccgtatagattaccaggcgctgccggagcacgaaaaacacatctttatcagcaacctgaaatatcagacgctgctggattccattcagggtcgtagcccgaacgtggcgctattgccgcttatttctattccggaactggaaacctgggtcgaaacctgggcgttcagtgaaacgattcattcccgttcctatactcatatcattcgtaatatcgttaacgatccgtctgttgtgtttgacgatatcgtcaccaacgagcagatccagaaacgtgcggaagggatctccagctattacgatgagctgatcgaaatgaccagctactggcatctgctgggcgaaggtacccacaccgttaacggtaaaactgtgaccgttagcctgcgcgagctgaagaaaaaactgtatctctgcctgatgagcgttaacgcgctggaagcgattcgtttctacgtcagctttgcttgttccttcgcatttgcagaacgcgaattgatggaaggcaacgccaaaattattcgcctgattgcccgcgacgaagccctgcacctgaccggcacccagcatatgctgaatctgctgcgcagcggcgcggacgatcctgagatggcggaaattgccgaagagtgtaagcaggagtgctatgacctgtttgttcaggcagctcaacaggagaaagactgggcggattatctgttccgcgacggtagcatgattggtctgaataaagacattctctgccagtacgttgaatacatcaccaatatccgtatgcaggcagtcggtttggatctgccgttccagacgcgctccaacccgatcccgtggatcaacacttggctggtgtctgataacgtgcaggttgctccgcaggaagtggaagtcagttcttatctggtcgggcagattgacagcgaagtggacaccgacgatttgagtaacttccagctctgatggcccgcgttaccctgcgcatcactggcacacaactgctgtgccaggatgaacacccttcccttctggcggcgctggaatcccacaatgtggcggttgagtaccagtgtcgcgaaggttactgcggctcctgtcgcacacgcctggttgcaggtcaagttgactggattgccgaaccgttagcctttattcagccgggggaaattttgccctgttgttgccgggcaaaaggcgatattgaaatcgagatgtgaattggttgtagtgccagatacaacgcttatgcgtcttatctggcctacaacgattacatggcgtagtaatacgctttcacctgctcccagtccgctttggggattggctccagatatttttccagctggcggaagtcatgattaatcgctttatcgcgacgcaagcggcgacgacttttctccaggtcaagaaaaccagcttctgcattaccttctgttttcacatagatatggcgaacataacaacagccatgctgacgattaatgctatgcattttcttaaacgccagcgccactgctttcaacatggcttgccgtacttcgtcagaataagggcttactgcatgctgggcataccagtcagcaatgctgatgaaccccgccatatcttcagtcaccagcaacgctcgccattcaccctcaattttcaccgcttcaccaaaaacgatcttcggcacgatgacaccggcccgttccagttctttaattaccgcaacctcacggacaatcgttggtcggccgaacggataacgtacggaatgaaacagatgatgcgtcatgcgctttacatacagctttttgccgttgcgctcgacgcattgcaccccgctcataccattacggcgatagttaggctcttcaacccagtcgccctctgttgcccaccagtgattaaattcgtcgtactttgcactaactgccataccctatcgcctgtcatttttattaacgacaatgactataggtggttacctgaggaaaatcttaatgaaacgtgtcgtattaatgaatttcttttgccactactagcttgacaccgcttttacccttcatttgcagcgcatagattccaccagccactaccactaatagtgcgcccagcagataaaatgtgaatttaatcaggcggatacagcgatgaattttattcgacagggattaggcatcgccttacaaccagagttaacgctgaaaagcattgcaggtgaattgtgttccgttcctctcgaaccaactttctatcgacagattagcttgctggctaaagaaaagccggtagaaggcagtccactgtttttactacaaatgtgcatggaacaattagtggcgattggaaaaatttgatatgagacaggatggcgcatgaacgccatcctgcagtaacattactctttattaagaaattttactgccttatcagggaaatcagtaaacagcccatttacacccgctttgttatacagagcatcatataactgattcacatcaggagtgtattcaggcagtttatcactccgcacggtataaggatgcactaccagtttattctgctgagcatcttgcaccatgccagtgagtttgatattacccggctggcttgtctcctcaatcaacatatggtaatccggaccaataccatctgcatattccgccacctgtttcatggcacccggcttaaacatccagtcgtagttgtaattaacccagcttccatccggctgtttctgctgcgtttcattccagtcggtataggcaatcagctgtaccagattgagctccatgcccattttgggttccagctcattcttaatacgcttcagctcatcagcatcaaaacattgcaaataaactttatcgtctttaccggtgtaaccatatttcttcagcacttccagcgtttttgccgcaatatccttcccttcctgatgatggaaccacggcgctttgatttctggataaataccgatatttttcccggtagagtgatttaacccctgaacaaattcaatctcttcttcaaaggtgtgcacccggaagtcggacttacccattgggaaacgccccggataagtctgcacttttttaccgttttcaatatcgaaaccttcggtaaatttcaagctcttaatttcatccagcgtgaaatctatcgcgtagtaacgaccgtctttgcgcgcccgatccgggaaacgatcggcaacatcagtaacacgatcgaggtaatggtcatgcagaacaaccagattgtcgtctttggtcatcaccaaatcctgttccagataatccgctccctgcgcatacgccatcgcttttgctggcagcgtatgctccggcaaatatccactggcaccgcgatgggcgatgactattttttcgttgctgtccgccgccattgcactgcttcccatgactatagtgctcatcatgatcgccatgctaaggtttttcagcgtcaatttcatgccattagcctccgttgcgttcttgcagtaattgttcatggcgacgtttttcgccaatcatcacaacaatcaacaagataaccgccagaatgctgccgccaatcattaccataaagccgccatcccagccgaagaagtccacggtgtagccaacaatcgcgctcgccgccacgctaccgcccaggtaaccaaacagcccggtaaagcccgctgccgtacctgccgcttttttcggtgccagttccagcgcatgcagaccgatcagcatcacaggaccgtagatcaggaagccgataacaatcatacaaatcatatcgacggttgggttacctgccgggttcatccagtaaacgatagtcgcgatggtcaccagtgtcataaagaaaacgccggttgccccacggttgccacggaagactttatcgttcatccagccgcacagcagagtgcccggaatacctgcatattcataaaggaagtaggcccaggaggatttatctagcgcgaaatgcttaacctctttcagataagtcggactccagtcgaggatgccgtaacgcagcagataaacgaacacgttggcgatggcgatataccacagcagtttgttcggcagtacgtactgcatgaagatttgcttcgccgtcagctcctgttccgctttttcgttatagtcgtccggataatcatttttgtactcttcgatcggcggcaagccacaggattgcggggtatcgcgcatcatcgcaaaggcgaataatgccaccagaatggcgcagaaagcaggcatatagagcgccgcatgccagtcattgaaccaggccatccccagcaggaacagcagcggcggaataccaccaccgacgttgtgcgcacagttccacacactcacaatgccgccacgttctttctggctccaccagtgcaccatagtacgaccacacggcggccaccccatcccctggaaccaaccgcagaggaacaacagtacaaacatcaccgcaatgctgctcgtcgcccatggcacaaagcccataaacaacatcactgccgccgccagaatcaaacctgcgggcaggaaaacgcgcggattgctgcgatcgcttacgctacccatgatgaatttgctaaatccataagcaatgctgatcccgctaagggcaaaacctaaatcaccgcgactgaatccctgctcaaccagataaggcatagcaagcgcaaagttcttacgaaccaaatagtaagccgcatagccaaagaatatccccaggaaaatttgccagcgcaatcgacgataagtcggatcgatctccgcggcaggtaagcgcgctttgtgtggcgctggtttaaaaatactcaacattgatagcctccgtggcccgtggtcttatttatgattaacagcctgattcagtgagagaacctgccgtttcttgagttgccgcgatgttaagaaaacattcataaattaaatgtgaattgccgcacacattattaaataagatttacaaaatgttcaaaatgacgcatgaaatcacgtttcactttcgaattatgagcgaatatgcgcgaaatcaaacaattcatgtttttactatggctaaatggtaaaaaacgaacttcagagggataacaatgaaaactcgcgacagccaaagtagtgacgtgattatcattggcggcggcgcaacgggagccgggattgcccgcgactgtgccctgcgcgggctgcgcgtgattttggttgagcgccacgacatcgcaaccggtgccaccgggcgtaaccacggcctgctgcacagcggtgcgcgctatgcggtaaccgatgcggaaagcgcccgcgaatgcattagtgaaaaccagatcctgaaacgcattgcacgtcactgcgttgaaccaaccaacggcctgtttatcaccctgccggaagatgacctctccttccaggccacttttattcgcgcctgcgaagaagcagggatcagcgcagaagctatagacccgcagcaagcgcgcattatcgaacctgccgttaacccggcactgattggcgcggtgaaagttccggatggcaccgttgatccatttcgtctgaccgcagcaaacatgctggatgccaaagaacacggtgccgttatccttaccgctcatgaagtcacggggctgattcgtgaaggcgcgacggtgtgcggtgttcgtgtacgtaaccatctcaccggcgaaactcaggcccttcatgcacctgtcgtggttaatgccgctgggatctgggggcaacacattgccgaatatgccgatctgcgcattcgcatgttcccggcgaaaggaagcctgctgatcatggatcaccgcattaaccagcatgtgatcaaccgctgccgtaaaccttccgacgccgatattctggtgcctggcgataccattagcctgattggtaccacctctttacgtattgattacaacgagattgacgataatcgagtgacggcagaagaggttgatattctgctgcgtgaaggggaaaaactggcccccgtgatggcgaaaacgcgcattttgcgggcctattctggcgtgcgcccgctggttgccagcgatgacgacccgagcggacgtaacgtcagccgtggcatcgtgctgctcgaccatgctgaacgcgatggtctggacggatttatcaccatcaccggtggcaaactgatgacctatcggctgatggctgaatgggctaccgacgcggtatgccgcaaactgggcaacacgcgcccctgtacgactgccgatctggcactgcctggtagtcaagaacccgctgaagttaccttgcgtaaagtcatctccctgcctgccccgctgcgcggttctgcggtttatcgtcatggcgatcgcacgcctgcctggctgagcgaaggccgtctgcaccgtagcctggtatgtgagtgcgaagcggtaactgcgggtgaagtgcagtacgcggtagaaaatttaaacgttaatagcctgctggatttacgccgtcgtacccgtgtggggatgggcacctgccagggcgaactctgcgcctgccgcgctgccggactgctgcaacgttttaacgtcacgacgtccgcgcaatctatcgagcaactttccaccttccttaacgaacgctggaaaggcgtgcaacccatcgcctggggagatgcactgcgcgaaagcgaatttacccgctgggtttatcagggattgtgtggtctggagaaggagcagaaagatgcgctttgatactgtcattatgggcggcggcctcgccggattactctgtggcctgcaactgcaaaaacacggcctgcgctgtgccattgtcactcgtggtcaaagcgcactgcatttcagttccggaagcctggatttgctgagccatctgccagatggtcaaccggtgacagacattcacagtggactggaatctttgcgtcagcaggcaccagcccatccttactcccttctcgagccacaacgcgtgctcgatctcgcttgccaggcgcaggcattaatcgctgaaagcggtgcgcaattgcagggcagcgtagaacttgctcaccagcgggttacgccgctcggcactctgcgctctacctggctaagtagcccagaagtccccgtctggccgctgcccgcgaagaaaatatgtgtagtgggaattagcggcctgatggattttcaggcgcaccttgcggcagctagcttgcgtgaactcggccttgccgttgaaaccgcagaaatagagctgccggaactggatgtgctgcgcaataacgccaccgaatttcgcgcggtgaatatcgcccgtttccttgataatgaagaaaactggccgctgttacttgatgcgcttattcctgtcgccaatacctgcgaaatgatcctgatgcccgcctgcttcggtctggccgatgacaaactgtggcgttggttgaatgaaaaactaccttgtagtctgatgcttttgccaacgctgccgccttccgtgctgggcattcgtctgcaaaaccagttacagcgccagtttgtgcgccagggtggcgtgtggatgccgggcgatgaagtgaaaaaagtgacctgtaaaaatggcgtagtgaacgaaatctggacccgcaatcacgccgatattccgctacgtccacgtttcgcggttctcgccagcggcagtttctttagtggcggactggtagcggaacgtaacggcattcgagagccgattctcggccttgatgtgctacaaaccgccacgcggggtgaatggtataagggagatttttttgcgccgcaaccgtggcagcagttcggtgtaaccactgatgagacgctacgcccgagtcaggcagggcaaaccattgaaaacctgtttgccatcggtagcgtgctgggcggatttgatcccatcgcccagggatgcggcggcggtgtttgtgccgtcagtgctttacatgccgctcaacagattgcccaacgcgcaggaggccaacaatgaatgacaccagcttcgaaaactgcattaagtgcaccgtctgcaccaccgcctgcccggtgagccgggtgaatcccggttatccagggccaaaacaagccgggccggatggcgagcgtctgcgtttgaaagatggcgcactgtatgacgaggcgctgaaatattgcatcaactgcaaacgttgtgaagtcgcctgcccgtccgatgtgaagattggcgatattatccagcgcgcgcgggcgaaatatgacaccacgcgcccgagcctgcgtaattttgtgttgagtcataccgacctgatgggtagcgtttccacgccgttcgcaccaatcgtcaacaccgctaccagcctgaaaccggtgcggcagctgcttgatgcggcgttaaaaatcgatcatcgccgcacgctaccgaaatactccttcggcacgttccgtcgctggtatcgcagcgtggcggctcagcaagcacaatataaagaccaggtcgctttctttcacggctgcttcgttaactacaaccatccgcagttaggtaaagatttaattaaagtgctcaacgcaatgggtaccggtgtacaactgctcagcaaagaaaaatgctgcggcgtaccgctaatcgccaacggctttaccgataaagcacgcaaacaggcaattacgaatgtagagagcatccgcgaagctgtgggagtaaaaggcattccggtgattgccacctccagtacctgtacatttgccctgcgcgacgaatacccggaagtgctgaatgtcgacaacaaaggcttgcgcgatcatatcgaactggcaacccgctggctgtggcgcaagctggacgaaggcaaaacgttaccgctgaaaccgctgccgctgaaagtggtttatcacactccgtgccatatggaaaaaatgggctggacgctctacaccctggagctgttgcgtaacatcccggggcttgagttaacggtgctggattcccagtgctgcggtattgcgggtacttacggtttcaaaaaagagaactaccccaccagtcaagccatcggcgcaccactgttccgccagatagaagaaagcggcgcagatctggtggtcaccgactgcgaaacctgtaaatggcagattgagatgtccacaagtcttcgctgcgaacatccgattacgctactggcccaggcgctggcttaaactcctttctgatgcccggtaagcatgtggttaccgggcatttttgcgtacacgattccgtgcccaatgtatgcgttgcaacgcagtgaaaattcctctgaaaacgtctcgcaaaggctgaaactggcagatgtcaaaggcctgggataaccgtaatgtcgcgtcatcataaatatcaggtgacggacaaccatgaccgaaagtacaacctcctccccgcatgatgcggtatttaaaacctttatgttcacacccgaaaccgcacgggattttctcgaaatacatttaccagaaccactgcgcaagctttgcaacctgcaaaccttacgcctggaacccactagttttattgaaaaaagtttacgcgcttactacagcgatgttttgtggtccgtggaaaccagcgacggtgacggctatatctactgcgtgattgaacatcaaagctctgcagaaaagaatatggcttttcggctaatgcgctatgccactgccgccatgcagcgtcaccaggacaaaggctatgacagagtcccgctggtggtgccgttgctgttttatcatggcgaaaccagcccttacccgtacagtctcaactggctggatgagtttgacgatccgcaacttgcccggcagttgtacaccgaagcttttctgttggtggatatcaccatcgtacctgacgatgagatcatgcaacatcggcgtatagctctgctggaactgattcaaaagcatattcgcgaccgcgatttaatcggcatggtcgacaggatcaccacgcttttggttagaggcttcactaatgacagccagctacaaacactgtttaattatctgctgcaatgcggcgatacctcccgtttcacccgttttattgaggagattgccgaacgtagtccactacaaaaggagagattaatgactattgctgaacggctacggcaggaagggcatcaaattggctggcaggaaggtatgcatgaacaagccattaaaattgctttgcgcatgctggagcagggctttgaacgtgagattgtgctggcgacaacccaactcactgatgctgatattccgaactgtcattaaaaggagagattaatgactattgctgaacggctgcggcaggaaggacatcaaattggctggcaggaaggtaaattagaaggtttgcatgaacaagccattaaaattgctttgcgcatgctggaacagggctttgatcgtgaccaggtgctcgcggccacccagctaagcgaagccgatctggcagcgaataaccactaattaacacaggcccacagccgatccccatgggcctttgatatcaataactaccttttatgcgtggcccatttttgccacttttaaacatcgccagtcgttgatccagggcatcgctgtagagcatcgtgtcaacgccaacagcgacaaagttcgctccccacgccaggcattgctgcgccatatcaggagccacagccagaaaaccagccgctttacccgcagcacggatccgccgaatactggtttcaataattcgctgcacttccgggtgcccggcgttatccgggtagcccaagctcgcagaaagatccgcaggtccaataaacacgccatcaatcccttcgacgtcgaggatttcgtccaggttatccagtgccgttttactttccacctgcaccaacagacaaaggctatcgttaacttgcgccatgtaattctcaatgcgtccccagcgcgcagcccgtgccacactggccccgacaccacgctcaccgtagggaggatagcgcgtggcagacaccacctgacgtgcctgttcggcagtatcgaccatcgggatcagtagagtttgcgcgccaatatccaggacttgtttaatcagcggtttactgccttccaccggacggatcacgggttggctggcatagggcgctaccgcctgtagctgatgataaagatcctgaatggtgtttggcgcgtgctccccgtcaatcagcaaccagtcataaccagaagtggcggcaatttctgccatataggcagtcgtactgcttaaccacagaccaatttgcacttcgcccttgcgtaaacgttctttaaagggattgcttaataatgcgttcatcgtgttccttaacctatttaatgatgtgccacgtcggtctgcgcaacagtgcgatttacacgcagagtgaaaataatcaggctaccgatgaccgccaccgctgccagcgtcagtaatcccgccgcatcgctggcaaataacgtttctgctttcacgcgcaggatcggggcaataaacccgcccactgcaccaaacaggtttacaaaaccaattcccgcagccagcgccgtaccggaaagcagttgtgtcggcatcgtccagaacactggctgcacggcaataaacccgatagctgcaacacacagcgctacgatcgccattactggagaaagcagcccggacagaccaataccaatgcccgccgccagtaatgtcagcgctgcgacattacgccgttcgccggttttatcggaatagcgcggaataagccaggtcccaaacaaggccgcaacccacggaatggcggtgaccacgctcgctgtaaagcccacttttgttcccagcaatgccgcaacctgggtcggcaggaagaaaattaatccgtaaaccgccacctgaatggtcaggtagataatcgctagttgccagactcggccattacgcagcgcatcgctcagccgagaagtcactttctgttgttcttcacttgccagttgattgataagcaacgttttttcttgtttactcagaaaacgtgcctgctccggtgtgtcatcaagccaaaagaatgtgaataccccagcaccgactgccaacaatccttcaatcacaaacatccagaaccagccgggatgccccataaatccatgcatctccaacagcgcgccggaaagcggacttcccagtgttaacgccagcggtgcgcccatatagaacagccccataatgctggcgcgattacgctgcggaaaccattggctggtgagataaatcataccagggaaaaatccggcctccgcagcacgaagcagagtgcgaactatcagaaatttcgcttcagtatcggcccatgccatggctgcgctaagaaatccccacagcagtgttgtcgtaccaatccaggttctggcccccagtttgcgcatcaaaagattcgccggaacacccagaaacgcatataccacaaagaaaatgcctgctcccagcgcataagcttcattactcaacccggtatcaatctggtaggtctgtttggcaaaaccgatattgctacggtcgagaaacgccagcacatacagcgccaacataaacggaattaaacgcacacggtttttcttcaccacggcgtcaagcaaagcggtgctcataaaaagctccttagaatatgtgggcgttaccgttgtcacagcaacgcccggagtgattagtggctgtaggggcgtttcaaattgcagtcatgattgagttcgacgccaaaaccgggtttatcaagcacacttttatgaatacgaccattcaccggaaccggctcattgagcagaatcgggtcaaactgcggacgcatcgtactacaatccgggctggtcatcaggaattcgctgaatggcgtattggtgaaggtgatcaccgcatggtgagagtaaacagagctaccgtgcggcaccaccagttgccccctggatttggcgattgcggcaatttccaccagcgtggttaaaccaccgcaccagccaacatccggctgcataatgtcgataccggtttcactaagcgtacgaaaagattgcagtgtgccgtggtgctcaccgctggtgaccatcattccgactggcgcgttgcgtttcagttcgcgataactttcatactgctgtggcggcaggcactcttcgatccatttcaggttatagggcgcgcaagcgtgggccagtttggtcgcatagttcacgtcctgactcatccagcagtcgagcattaaccagaaatcctcaccgcatttttcacgcatatccgcgaccatagcggcatctttgcggatccccgcatcgccatcatgtggcccccagtgcgtcggcattttgccaccgataaagcccatctcttttgccagatccggacgcgcacctgtggcgtagaactgaatctcatcacgaacagcgccgcctaaaagtttataaaccggaagcccgaccactttgccgaacagatcccacagagccagatcgacacaagaaatcgtattcatcaccaggccaccagagccggagtaatacagggtggcactgagcatttgatcgtggatcagtttgatatcactgacacatttaccctcaatgaaacggttaagatgtttttcgacaataaaacagcccatttcaccggctgtgctaacggcgaatccggtctggccgttttctgcttcgacttcaacaaccaacgtgccaagaacgttaatgccaaaactctggcgactctgctcgtaatcgcggtatttactcatcggggtggcaatatgatcgtctatccagtgattcgccccctggtcgtgataatcaccgccgccagcgcctttttctgctgtcgcaccgccagtaaaccaggcgcgaacctgtttaatttttggtagggtcatgatgttctccattgttaactggcttgtaagtcaaagggacttttccatcccaacagacgactaatatccctggcgcaggcaatggccttgcccgccagataatcacggtattcttcattgatttgtaagcgggtaccgaccacgctgatcgcagcggtaagctcgttattggcgttaaacaccggcgcagcgacacaacggacatcggcgtaatcttcgccgttgtcatagctccagccctgacggcgaatacgcgccagttcttcgtgaagttgctgtggatgagtaatcgttgtgggtgtcgcctgctcccagaccagcccttcgataatactttgctgtaccgctgcaggttgccaggcaagcaggcatttacctattccggagcgataaaggctaaggctttttccttcatgggaacgcacgctgatagtggcactactctccactttcaaaatgtaataagcgctgccgttatcaataatccccaggtgacataacagcccggtggtatccatcagttgcgtcaaacgcggtcgagccagttcccggagatccatcttgcttaacgcatgaccggaaagctccaccagcctggtccacaaacaaaaattttcctggtgatcaaggctaagaaaacgctgacgcctgagttcattaagcagcaaataggccgtgcttttagggattcccaatgtgtcaatgatcgtcgcagcactacaggggccaatgcgggcaatcaaattgagaatatcaatagcccgtgtcagggcgggaactttgctactttccaacatactggactccagtcttagatactggaatcagtctcgttgctcagggggagtaaaattgtgaagcgcatcaaatcccgctcctcgtccagcagactggagaaattacgcacaaatttgtgaatcagcgcacggattttttcttattgagtacaacaggttggacaaattttgccggagggggaatgtgccggtgcagtaaaccggcacagagtggcggaatcagacagataaggtcatggactcaacaacctcaatccagccatgctcactggcgatatcctggccgtttaaccaacggcgcagcatattcagtgccatcattgcgcacacttcctgacggatagccaggctgtagcgcgtagtgctgaaacgcacacgcagagcgaaagtgccgtctggcgtggctagcgcaaagttgagatgctcgttctcgaaaccgctaacagccagtgccagcccggcaaaatggttggcccgccgttctgtaatccagtgcgcagtttgcgccagggtttcctcctgactaggaaccacttcacacgccagcaatggagcacctgcgcgagaaagttgcaaagccaataaaccaccggtgaattgctcgctcaacgtcaggctgaactggcggttttgcaattcgcgactgatctgcgcgggcagtccttcagtgccttcgaaaatcacgctctgtccggcaacacgtttaacatccagccacagtttttccatcgcctgttgctcgcttgccggtccggtgagtttcagttcgatgataggcatactggagcgatagcccattgttacgcccggcggcagttgtagagtgtccaggctttgtgccagatcgctttcgctacgaccaaaagtagtcaaacgcagacaaaccggcggctgcggtaaagaaaaacgctcgcgcaggcgcggcaggatttcgtgctcgaccatcaccttaaattcactcggtacgccgggagtaaagaacatcaggcaacgattaagctgcacggcaaaaccacaggcggtgcctaccgggttattgataaattcagcactggcaggcagctccgcttgtttacggttgctcggtgccattactcgtccacgttcgtggaaatagcgttccatctctttgagccaggcttcatgcagcaccaggccttcaccttttgctgtcgcagcggcgagtgcgcttaaatcatcgctggtcggtcccagcccgccgttaacgatcagcacatcggcgtgctgactacgttcgcgaagaatggtgactaagtcatcaaggttatcccccaccgtattgcggcgagataatggcaacccctgatgaaagaaaaaatcggccagccaggcagcgttagtgtcaacgatttgcccgtgtaacacttcatccccggtggataacatttccacttttaacatggttatctcctgcttttgttatcgaatcactataacgcaaagggagataaggcgtagtaagaaactgaatggcgcgacagaatgccgcgccggaagggatcagaaactggcgttaaccccaacatacgggccgtcagccacggcgttgtcgcggttaccgtctttaccgctcagattcaggtagcgataacccgcctcaatactgactggacgcataatggtgtaacgcgcgccagcattcgcttcttcataactttgaataccgctggagaggctatccggagagtagtaatactcgccaaacaaacggaagctgttgccaattttccactgcaaaccacctcctaccgctgcggcataaccttcatcgccgtaattcgggttggtgtaaacgccttttccgccaacggtcgccattaacggcccgagaggcagattcaaccccagccccacgccagcgacatcaccgtcgtcgtcgttatgtgtccagttaccgcttaacgccaggcccgtcgtttcagtcccaaaaccgacaccaatattggtgtattctttacccgcctgaccgctgatgctcattgcattgacgcttgcagaaaccaacagcattccggccagacctgctagcgcaatttttttcattatcccctttcccacaagcaattaatcaaaattcccaaagctgcgggattgtactgcctggcacagaggattcaatgagcgaaaaaaaggatctagtcacttattgtaactaaatacttcttaaataattaaatgccgaaaaaataaacacactttatcgatacacacaaaaataataataagtacagttatcatcgcaaaagagattactgtcactttcacatatttgtgagttaccgtattctcatggtttctttttatttataaggaatatccctgtgcgacaacggactattgtatgccctttgattcaaaatgatggtgcttatttgctgtgtaaaatggccgacgatcgcggcgttttccccggtcaatgggcgattagcggtggcggcgtggagcctggcgaacgaattgaagaggcactacgccgcgaaattcgcgaagaactgggagaacagctgcttttgacagaaatcacgccgtggaccttcagcgatgatattcgcaccaagacgtatgcagatggtcgcaaggaagagatttatatgatttacctgatttttgactgcgtttctgccaaccgagaagtgaaaataaacgaagagtttcaggactacgcgtgggtaaaacctgaagatctggtgcattatgatttgaatgtcgccacccgaaaaacgttacgtttgaaaggtcttctgtaacaatgatgacagccattactggctgtcagattgaaaatttagtggttaacgaattccccatccagataaactttgcctttttccacatgcatgactaaaccatccagataatcaggtttaaatgtcgcgtcacgcttatctttagcaatatatgtcaggcaatgattatgggtgaaaataacgatatttttatcaggcgctttgctttgtaagtccttaattgcactataaatctcattaccgcactgaagaagtcgtttatctaccgtcaattttttacccgcactaaaccaggtagcgctctgaatggtccggacggtattactggaataaagatcgaaatcagggatatcagcactaaaagcgttgcccagttcacgggcatcctgggtacctttaaccgtaatacctgttttatcactcaagcattgattggtactacggtcgcaacgttcagcatgacgaaacaaaacgacaaccgggtgctgctgtgccagtctggccagtgttttattgtcgatacgtggcaaaccattgctactccaggcggcatgagtacccagtccggcaattgcagcgagcgccagtaaaatgatgatatattttttactcttcaagctagagcggcaaaaagctaacacgtaaactccacctatagacaagcgcaaccagacaattaccgtgaaattgagctacatttctggcgataattcgcagttggtgtaatattaaaaatcctacgatgtcggcaaaatgcctcaaaattttgccaaatgcaaagcctaaataagaaaaaatataaaaatttcaatatttacgtctaatattagtttcttaaggttaagttaatattctatccttaaaatttcgctccaaatggcaaaatatacacaacactctttatagcaaatataagtggacaggtattcaatggcggaaggaaaagcaatgagtgaatttttgccttttagccgaccagcaatgggcgtggaggaactcgctgcagttaaagaggttctcgaatccggttggatcacaaccggtccgaagaatcaggcgcttgagcaagctttttgccagttgacgggaaatcagcatgccatcgcggtcagtagtgccaccgccggaatgcatatcacgctaatggcgttgaaaattggcaagggcgatgaagtgattacgccttccctgacctgggttagtaccctcaatatgatttccttgttgggtgcaacgccggtaatggtggatgtcgaccgcgatacgctgatggtcacgcctgaagctatcgagagtgccattacgccacgcactaaagccatcattccggtgcattatgccggtgcgccagcagatattgacgccattcgcgccattggcgaacgttacggcatcgcagttatcgaagatgctgcccatgccgtcggtacgtattacaaagggcgacatattggcgcaaaaggtaccgctatttttagttttcatgccattaaaaatattacctgtgctgaaggtggcctgattgtaactgataatgaaaaccttgcccgccagctacggatgctgaaatttcacggtctgggtgtcgatgcctatgacagacaaacctggggccgtgcaccgcaggctgaagtcttaacaccgggctataagtacaatctgaccgatattaacgccgcgattgccctgacacagttagtcaaattagagcacctcaacacccgtcggcgcgaaattgcccagcaatatcagcaagcactggcagctctcccctttcagccattaagccttcccgcctggccgcacgttcacgcctggcatctgtttattattcgtgtcgatgaacaacgttgtggtatcagtcgcgatgcgttgatggaagcgttaaaagaaagaggcattggtaccgggttacatttccgcgccgctcacacacaaaaatattatcgcgagcgttttcccacgctgagcttaccgaataccgaatggaatagcgaacgcatctgttctttgccgctgttcccggatatgactaccgccgatgccgaccatgtcatcacagcccttcagcaactcgcaggacaataagccatgtttgaaatccaccctgttaagaaagtcagcgtggttattcccgtttataacgagcaggaaagcttaccggaattaatcaggcgcaccaccacagcctgtgaaagcttggggaaagagtatgagatcctgctgattgatgacggcagtagcgataattccgcgcatatgctggtcgaagccagtcaagcggagaacagccatattgtgtctattttgcttaaccgcaattacgggcaacatagtgcgattatggcgggattcagtcacgttactggcgacttaattattacccttgatgccgatctccagaatccgccagaagaaatcccccgcctggtggcaaaagccgatgaaggttacgacgtggtagggactgtacgccagaaccgccaggacagctggtttcgtaaaaccgctagcaagatgattaaccggcttattcagcgcaccactggcaaagcgatgggtgattacggttgtatgctgcgcgcctatcgccgtcatattgtcgatgcgatgttgcactgccatgaacgcagcacctttatcccgattctggcgaatatcttcgcccgccgtgccattgaaattccagtacatcatgccgagcgtgagtttggtgaatccaaatacagttttatgcgcctgattaatttgatgtacgacctggtgacctgccttaccacaacgccgctacgtatgctgagtctgctcggcagcattattgcgattggaggttttagcattgcggtgctgctggtgattttacgcctgaccttcggaccacaatgggcggcagaaggcgtctttatgctatttgccgtgctgtttacttttattggcgctcagtttatcggcatgggattactcggtgaatatatcggcaggatctacaccgatgtccgcgcccgcccccgctattttgttcagcaagttatccgtccatccagcaaggaaaatgaataatgaaaaccgtcgtttttgcctaccacgatatgggatgcctcggtattgaagccctgctggctgccggttacgaaattagcgccatttttacccatactgataatcccggtgaaaaagccttttatggtagcgtggctcgtctggcggcggaaagaggcattccggtttatgcgccggataacgttaatcatccgctgtgggtggaacgcattgcccaactgagcccagatgtgattttctctttttattatcgccatcttatttacgacgaaattttgcagctcgctcccgcaggtgcatttaatctgcatggtagcctgttaccaaaatatcgtggtcgcgcgccgctgaactgggtgctggtcaacggtgaaacggaaactggcgttacattgcaccgaatggtgaaacgtgccgatgccggggccattgtggcgcaactgcgcattgccattgcgccagacgatatcgctattacgctgcatcataaattgtgccatgccgcgcgccagctactggaacagacattacccgccattaaacacggtaatattctggaaatcgcccagcgcgaaaacgaagccacctgttttggtcgcagaacgccggatgacagtttccttgaatggcataaaccggcatccgtactgcacaacatggtacgtgccgttgccgatccgtggccgggtgccttcagctatgttggcaatcagaaattcaccgtctggagcagccgtgttcatcctcatgccagcaaagcacagccggggagcgtgatttctgttgcgccactgctgattgcctgtggcgatggcgcgctggaaatcgtcaccggacaggcgggcgacggcattactatgcagggcagccaattagcgcagacgctgggcctggtgcaaggtagtcgcttgaatagccagcctgcctgcaccgcccgacgccgtacccgggtactcatcctcggggtgaatggctttattggcaaccatctgacagaacgcctgctgcgcgaagatcattatgaagtttacggtctggatattggcagcgatgcgataagccgttttctgaatcatccgcattttcactttgttgaaggcgatatcagtattcattccgaatggattgagtatcatgtcaaaaaatgtgatgtcgtcttgccgctggtggcgatagccacgccgattgaatatacccgcaacccgctgcgcgtatttgaactcgattttgaagagaatctgcgcattatccgctactgcgtgaagtaccgtaagcgaatcatcttcccgagtactagtgaagtttatgggatgtgtagcgataaatacttcgatgaggaccattctaatttaatcgtcggcccggtgaataaaccacgctggatttatagcgtaagtaaacaattacttgatcgggtgatctgggcctatggcgaaaaagagggtttacagttcaccctcttccgcccgtttaactggatgggaccacgactggataaccttaatgcagcgcgaattggcagctcccgcgctattacgcaactcattctcaatctggtagaaggtagtccgattaagctgattgatggcggaaaacaaaaacgctgctttactgatattcgcgatggtatcgaggcgttataccgcattatcgaaaatgcgggaaatcgctgcgacggtgaaattatcaacattggcaatcctgagaacgaagcgagcattgaggaactgggcgagatgctgctggcgagcttcgaaaaacatccgctgcgccatcatttcccaccgtttgcgggctttcgcgttgtcgaaagtagcagctactacggcaaaggatatcaggacgtagagcatcgtaaaccgagcatccgcaatgcccaccgctgcctggactgggagccgaaaattgatatgcaggaaaccatcgacgaaacgctggatttcttcctgcgcaccgttgatcttacggataaaccaagttgacctaagatcttacggataaaccatcatgaccaaagtaggcttacgcattgatgtcgatacctttcgtggcacccgtgaaggcgtgccgcgtctgctggaaatcttgagtaagcataatattcaggccagcatttttttcagcgtcggcccggacaatatgggccgccatctctggcgactggtgaagccacagtttttgtggaagatgctgcgcagtaacgcggcaagcctttatggctgggatattttactggcaggtacggcctggccaggtaaagagattggtcatgccaatgccgatatcattcgtgaagcggctaaacatcacgaagtcggcctgcacgcctgggatcaccatgcctggcaagcccgtagcggtaactgggatcggcaaacaatgatcgacgatattgcacgcggtcttcgcactctggaagagattatcggtcaaccggtaacctgttctgccgctgcgggctggcgtgccgaccagaaggtgatcgaagcaaaagaagcgttccatttgcgctacaacagcgattgtcgtggggccatgccgttccgtccattgctcgaaagtggaaaccctggcactgcgcaaattccggtgaccttacccacctgggatgaagtgattggtcgggatgtgaaagcagaagattttaacggttggttactcaaccgcatcctgcgagataaaggcacgccggtttataccattcatgcagaagttgaaggctgcgcttatcagcataattttgtggatctcctcaaacgcgcagctcaggaaggcgtgacattttgccctttaagcgaactgttaagtgagacgttgccgctcggacaagttgttcgcggaaatattgccggacgtgaaggctggctgggttgccaacaaattgcgggtagtcgctgatgaaaagcgtacgttaccttatcggcctcttcgcgtttattgcctgctattacctgttaccgatcagcacgcgtctgctctggcaacccgatgaaacgcgttatgcggaaatcagtcgagaaatgctggcatccggcgactggattgtgccccatctgttagggctacgttatttcgaaaaacccattgccggatactggattaacagcattgggcaatggctatttggcgcgaataactttggtgtgcgggcaggcgttatctttgcgaccctgttaactgccgcgctggtgacctggtttactctgcgcttatggcgcgataaacgtctggctctactcgccacagtaatttatctcagtttgtttattgtctatgccatcggcacttatgccgtgctcgatccgtttattgcattctggctggtggcgggaatgtgcagcttctggctggcaatgcaggcacagacgtggaaaggcaaaagcgcaggatttttactgctgggaatcacctgcggcatgggggtgatgaccaaaggttttctcgcccttgccgtgccggtattaagcgtgctgccatgggtagcgacgcaaaaacgctggaaagatctctttatttacggctggctggcggttatcagttgcgtactgacggttctcccttggggactggcgatagcgcagcgggagcctaacttctggcactattttttctgggttgagcatattcaacgctttgcactggatgatgcccaacatagagctccgttctggtactacgtgccggtcatcattgccggtagcctgccgtggctgggattactccccggtgcactgtacacaggctggaaaaaccgcaagcattccgcaaccgtctatttgttgagctggacgataatgccgctgctgtttttctccgtcgctaaaggtaaattgcccacctatattctttcctgctttgcatctctggcaatgctgatggcgcattacgctttgctggcagcaaaaaataatcctctggcgctgcggattaatggctggattaacatcgcttttggcgtcactggcattattgccacatttgtggtctccccgtggggaccaatgaacacgccggtgtggcaaaccttcgagagctataaagtcttttgtgcctggagcatttttagcctatgggcatttttcggctggtacaccttaacaaacgtcgaaaagacctggccttttgccgcgctttgcccgctggggctggcgttgctggtaggatttagtattcctgacagagttatggaaggaaaacatccgcaattttttgtcgagatgacacaagaaagtcttcagccaagccgctatattcttactgatagcgtcggtgttgccgcaggtctggcatggagcctgcaacgcgatgacatcatcatgtatcgccagacaggtgagttgaaatacggccttaattatccggatgcgaaagggagatttgtcagcggtgatgagttcgcaaactggcttaatcaacatcgtcaggaggggattattactctcgtgcttagcgttgaccgcgatgaagatatcaacagtctcgccattccgcccgcagatgccatcgatcgtcaggagcgtctggtgctgattcagtatcgtcccaaatgatctggctaacattagtctttgccagcttgcttagcgttgccgggcagttgtgtcagaaacaggcaacctgctttgtggcgataaacaaacggcgcaaacatatcgtgctgtggctgggactggcgctggcttgtcttggtcttgccatggtgctctggctgctggtcttgcagaacgtaccggtaggcattgcttacccgatgttaagtctgaattttgtctgggtgacgctggctgcagtaaaactgtggcacgaaccggtaagcccgcgtcactggtgtggggtggcgttcattattggcggcattgtgaacctcgggagtacggtgtaatgggcctgatgtggggattattcagcgtcattattgccagtgttgcgcaattaagcctgggttttgcggcgagtcatctgccgccgatgacgcacttatgggattttatcgcggctctgttagcttttggcctggatgcccggatactgttactcgggctgctgggttatctgctttccgttttttgttggtataaaacgcttcataaacttgcgctaagcaaagcctatgccttgctcagtatgagttatgtgctggtatggattgctagtatggtacttcccggctgggaagggacttttagcctgaaagcactactgggagtagcctgtattatgagcgggttgatgctgattttcctgcccacgacaaaacaacgttactgagttttccctgccactttacactgccgttcccactcatcggggctataactgcttgcgctgaggactttcaccgtatgcagcttttcacgattaatacaataaagcgcattctgcaaagggctgagtaaatcccccactttcacggcgaagtcactcttcacttcggcgatcatttttatcgcgccgccagcatcgcagagcataagtacatgtctgttatcttgtttattgcagcagctttttttgaccagccattccattgcattatcctgtttgctaagagttttcacatcaatttacagattaacagataaactctttatcaacggcaatggaatggcagaaatgagaagtgaaacggagggttaattattgctgacgttgcacccactcttttagcgcctgacgactaattttaataccgccgtttttcagctccggcggcagagttagccagcgcaccggttgttgaaaacgggccagcttatctttcacccattcactaagatcaacgctctcgtggtcatactccatcaccgccaccggtcgatgaccaaactccttgtcggcaacggggacgataaacacctgcaaaaccgcaggatgtgcagcaattacgcgctcgacttcttccggctgaataccctctccgccactgaagaatagattgtctaaacgtccgacaatggtcagcttgccattatgcatctcaccgcgatcgcgcgtagcgtaccagccttcgtcattaaccagactaaccagttgcccgttacgccagtaaccttctgccatactggcagcccgcagccacacttcattattaacgattttcacttcccgacccggcagcgggctaccaacgtctgccaggccgtcggcttctttcgcacacaccgtggaggcaaactcggtcagaccatagccgcaaaagcaacgaatcccctgctcgcgcgcctgttccgtcaactcgaccgggatagccgcgccgccaagtaacaccgctttcagggaaacggaactacggttaaccagcaaacgccagagttgtgttggcaccagactagcgtgagtacagcctgccagcatttgctccaatggctgtttatcacgtaccgtcatccgcgcaccagcgtataaccagcgccacataattccctgaccggagacgtgaaacagcggtaaagagagcaaccaatcatcgtgatcgccaaacggaatcaggcttaacacaccttgcgcactggcaagatgggcctgataagtatggacagcggctttcggcaaaccggtagaaccgctggtcaacgtcatactgcacagacgcgtcggctgccacgtagcggcatgtgcgccttcaaccagctgaatgtgcaggctcgttaatgccggaaacgtgttttccccatccggcaccagagcaaattgcagcgtcagattgggcagcaattcttcaagcaacggttgcggcagctgagggttcacgggcaacacccgcgccccgcattgcagtaacgccagccaggcgagcagcgtttgcggcgtattccacgcccgcaacatcacgccgctgccctcaaccaccccctgcaccgcaaatccggaggctaattcatcgacgcgagcacaaagctcgcgccagttgagttgctcgtcattaagacgtaaggcgatggtttctccccgcacttgccgccagtgacgccacggccagtcagagaagatcataacaaccgctccagtgcatcaacttccacgacaggcagcgtgctacccggccagcgacgtacctgctgcgcctgcatcagatccagcgtgtccagccctggaatggtgtccggcgttaaccaggcggcaatccgcgccagttgcgttaagcctaagctgctttcaatggaagaactgatcaccgccgtcagccccagcgcgtgcgccgcctgtacctgctcgcgtactttttccagactgcccgtgagcgtgggtttgataactaccgcgcgcacgccctcttcagccacaaaggcaaaatccggctcgcgcaggctttcatcccaggcaatggcaatgccggtttcacgggcaaacgctcggctatcatcgcgggttttgcacggctcttcgagaaacgcgatgcggtcgcgataatccgggttaacgtatttggcaaactgctgacctttcagcggtgtccaggcgcgatttgcgtcaagacgcaaatgcagatccggaattgcctccagcaacagattcaccaccatgccgtcgcgcaccgcttcgtacaatcccactttgaccttcgccactttctcgcctggcatatctgcaagtttgaggatcagatcgtccggatcgccattacacagcggtgccgcacggtagttggctgcttgcggcaacgtatctgtcagttctgccaatgcacagcttacgccaaaggccacggaaggcatctgcggtagctcgcaatcgcctgccagccagttatttacccaggcaagcagcacactttgcgcctcttcccaggtttcctgactgaagcccggcagtggggagatctccccccacccttcgcgctcgccttcacgcaggcaaacatacagcccgtcgcgggtttttaaccgcctgtcgcgcagaaccacccccgcgtccatggggatctgccagcggtatacctgcgcgctacgcattacggattccgtttgaatttgctgaagtcaggctgacgtttctggttgaaggcgttgcgaccttcctgaccttcttccgtcatgtagaacagcatggtggcgttgcccgccagctcctgcagccccgcctgcccgtcacagtcggcgttcagtgcagctttcaggcagcgcagcgccatcgggctgttttgcagcatttcgcggcaccaacggacggtttctttttccagatccgccagcggtaccacggtgttcacaaggcccatatccagcgcctgttttgcgtcgtactgacggcacaggaaccagatttcacgcgcttttttctgcccgacgatgcgagccatgtaggaagcgccccagccgccgtcgaaggaaccgactttcgggccagtctgaccgaagatggcattatctgccgcgatagtcaggtcgcacatcatgtgcagaacgtgaccgccgccgatggagtagccagccaccatcgcgacaaccggtttcggacaggtacggatctgacgctggaagtccagcacattcaggtgatgtacgccggaatcatctttatagccgccgtaatcaccacgcactttctggtcaccaccggagcagaacgctttatcgcctgcaccagtcagaatgatcacgccgatgttgtcgtcataacgcgcatctgccagcgcctggatcatctcttttaccgtcagaggacggaaggcattgcgcacctgcggacgattaatggtgatttttgcgataccgtcggtggatttttcataacgaatgtcctcgaaaccttcggagcagtcgtgccattcaaccggtgcgtaaagcattgcttcatcaggataaatcatattgtgtcctttagtcagaaacgcaagatctgcgccagacttgcgattacgccagcgggattttcccgatgcgcgttatgtccggcgcgaggaatgacatggcagtcggcagccagttccgccgccagggcgcggaatttgctgtcacgttcaccacataaataataaaacgcaaatgtgcgggcgctaaggttagcacgtaaatcaggctggacggcgagagaagtcgcctccagcatggcggcaagcgttgcgccattattgttgctgcgcagcgccaccagctcccggcgttgatcgtcattgagactggcaaaaacaggctgttgataccagtcggcaaataccgccgttaacggttctgtgagaaaacgctgcacccattggcgatcggaacgctgacgttccgcacgttgttcagcattttgcagccccggatgcccgccttcgacaataaccccacaaagccccgccagcccctggcaagccgccatcatcgccacccgtccaccaaggctgtaccccaccagccagaagtcaaggatgttgtaactaaccaaggttttacgcagtaagtcggtgacatcatcaaatccatcgacgctaatcgccgcgctaccaccgtgacctgggagatcaacatacaaccgactgtagtcggcaaacgcctcgcccacttcttgccattcgtggcaatcgccggaaaaaccgtgcaaaaacaccagccagggtaaacctggttttccgtgttttgcctgcgcgtgcaggatcataaatggcttacctgcgccagaagttgctggagcgtttgcgcaccatcggtgtcgttaaccaccatttcaatcaccgtggtggttggcgtgcgccaggcgtcggcaaatgccgtttcaagttcctgccagttttgcggacgatgatatttcagctcgaacatcgcggcggcgtgctcaaaatggacgttttgcggcatcagatagaaacgctcacgctcgctttgcggcgttggcaacaggctgaaaatttgcccgccgttgttgttcaccacaattaataccagcggcgcagaaacctgacgcaataacgccagcgcgttgagatcgtaaagtgcggagagatcgcccacaatcgccagcgtcggtttgccgcttgcccgctgaacgccggcggcggtgctaagcagcccgtcgataccgctggccccacggttgctgtacaccgggtaacctgccggaagttggctaagcgcatcaatcagacgtaccaccaggctgttaccaacaaacaattgcccctgttcaggcagatagtcgcagatgcgatgcgccagttgcgcttcgccaaacgcatcacggcgggcaataaccgcctgcattgcctgttccgccaggcgcgggatttcaacgcaccagggctggcgtttttctgccggatgcagctccagccagtcggcaatattggcaattaagcgacgtccgcgatggtgtgccggatcaagtcgcccttcaatgtcatcaacaatccagtactcttctggttcacagcttgcctgccattgcaggagccgtttccccgtcaggctgcttcccagttgcaccacaatttgcgcctgctgcagctcgctggtcgctttggcattgcctaaccaaagatcggcacacggcagcggctgcccggtttgactcagcacatcgccaatcagcggccagccaagagtttgcgcccacagggcaacttttttgccctcttccgcactcatgcgcccggcaaccaccacgccgcgcttttgtcgccagaagaaccagtcgcgctgtttttcactttccagacgaggcgcttcacgcagccacggtttgtcttcctgccaccagtcacccagacgctgttgccagctaagcccggtatcgtccatttcgccatacagcggttcagcaaacgggcagttgatatggactccccccgcatgaagcgtaccgagagcgtggtcgatggtagaaaccagccaacgtgcggggatatcctgggtcgggcgcggcaaactaatactgtgcgtggggtgagaggcgaacattcccggctggcgaattgcctgattcgcgccgcagtcaattagctccggcgggcgatcggcggttaagagaatcagtttttctccggttaacccggcttcaatcagtgccggatagagatttgccaccgccgtgccggaggtcacaatcaccgccaccggctgcttgctgactttcgccagccccagcgccagatgccccaacccacgctcatcgaaatgggtgtggtgaatgaatgcggaattctccgccgccgctaacgttaacggtgtagaacggctgcctggggcgatacagatgtgtctgacgccgtgacgcgttaatgcttccagaatgaccgccgcccagcgtcggttaaatgcgcttacactcatgagtttgtccggtatcaatattgcggctaagtataaggagctacaaaaatagattattgatatgaatcggtaatgatgcgactcattattattccatttgtaataaagtacgcagccctgccgctttgttgtcgatttcctgccactcttgctcggggtcggaaccacggacaatgcccgcgccagcatataatcgcacgacattgccgctaatttttgcactgcgcagggaaacgcagaattcgctttgttgtaaactgagatagcccgcagaaccggcgtaccattctcgggtgaacggttcgtgacgggcgataaactgtcgcgccagatcgcgcggtaagccagcaactgctgccgttggctgcaactgatgtaaacagatcacatcatccgctttgttgagactagtccagatacagcggcgaagatgctgcactttacgcagacgcagtacctgcggcggtaaaacatccagcgtctgggtatcggcctgtaatcgttgacagatatcttccaccaccagcatgttctcgcgctggtttttatcatccgccatcagccactctcctaactgctgcgcctgcttatcatcaggattatttgctactgttcccgccagcgcttcagtacgcagcgctttgtcacgccgccgccataaccgttccggactagagccaagaaaagcattttcgccatcaaaggccatgtaaaaatggtagcaattcagattcagtcgacgactggcagccatcatcgccgccgcgttgaccggacttgcgaaatgcaggtcagttgcccgagcgagcaccactttgtcgagctcaccttcggcgatggttttcgttgccagttcgattaattgcgtccagcccgttttgtccggccagtgttgttctcgcgtggtggttaaatgtaacccaggcaagggcttgatactcaccagtgtggcgataaattcttttgcctgaatcgcatcgtgctgaagggagctttcgctgaatagcgtcagccgcagcgtggctttaccgccacagcgtcgccattccaggcggggtaaaagtaaattgccctggctcgggtcaaaagcattcagcccccaaatgcgtaagtcggcgtgttccgggtgctggcgaagaaaacgttgtgcctggtccaagctcgtaaaacgggtaatcgcgcccaggacgacagcttcttcatcaccattacgttgttgccagtagaattgcgggtatgtttgctgactggccagccagctcaaggcatcaaaagcgtctttgagagggaaaggaatatcgataacccgaatgccgggtgtcgccggaatctcttggctcaaatggcgcagtagattttccagcgccgtagtaagactttgcacgcggacctctccctgttaaaagcctcacattatacggggtactacaaaaaaaatgcagtaccccggtgtagggaggttttaacggcgtgccagcaacagtcctagtaccagcccaacggccgcgcccacaccaattccttgccagggtttttcgtggacgtagtcatcagcacgataaactgcctgcttcgcccgatagtaataactgtcactagcctggctaacccgttttttcacatcatccagcgctttttctgcacgcgctttcagctcaacatatttctgatcggcgggatcgccagaggagcggagcacctcttccagtgtttcactaagcagcgtcaggtcgtcatcgatacgtgtatcaccaaactgattagacattctcgttctccatttgcgtaaaacctgtcactaactatagacaagggttgttgattacgcctgaattacctcgcgtgccatcccaatgtgtgggataccatcttcttcatagacctccgtcacagggataaaaccgaaactctggtagaagttttgcagatgcgcctgcgccccgaggtaaacaggcttatcaggccagtgatgcgtacatgtttcgagtgttttactcatcagctgctgccccactttttcgccacgcaacgcttcactgacaatcacccgacctataacgaccggctcaagatcatcatcacttttcagaatcctcgcatacgccaccagttcatcatttttccaaccgagaatatggcgattatcccccgtcaaatcatcaccatcgatatcctgataagggcaattctgctcgacaacaaacaccgcgcaacgcagttgtaataaggcataaagctgggaaacgcttaattcagagtgatgcagatcttgccattcaatcataatgctctccttttagatgtatgccttatactagccggaatattttttgaaacgtgatgaactcatggaattaatttttttaggtactagtgccggtgtgccaacccgcacgcgcaatgtcacggcaatattgcttaacctgcaacatccgacccagagcggactttggttgtttgactgcggtgaaggcacccagcatcagctactgcataccgcctttaaccctggaaaactggacaagatttttatcagtcaccttcatggcgatcatctttttggtttacccggcttgctgtgcagtcgttctatgagtggcattatccaacccttaacgatttatggtccgcaaggtatccgtgaatttgtggaaaccgcgctgcggattagcggcagttggaccgattatccgctggaaattgtcgaaattggcgctggcgaaattctcgatgatggcctgcgcaaagtaaccgcttatccgctggaacacccactggaatgttatggctatcgtattgaagaacatgataaaccgggtgcattaaatgcccaggcattaaaagctgctggcgtgccgcctggcccactgtttcaggaattaaaagcgggcaaaacaatcacgctggaagatggaaggcagattaacggcgcagattacttagctgctccagtgccaggtaaagcgctcgctattttcggcgataccggcccctgcgatgccgcacttgacctggctaaaggtgtcgatgtcatggtgcacgaagcgacgctggatataaccatggaagccaaagccaatagtcgcggccatagctctacacgccaggctgcgacactagcccgtgaggctggagtcggcaagctaatcattacccacgtcagcagccgctatgatgacaaaggttgtcagcacctgttacgtgaatgcaggagtattttcccggcgactgaactggcgaatgatttcaccgtgtttaacgtttaactctgcttattattaaaaacagggcgaaacttgccctgttatcgcaacccgcgctacatatatccacccacacaggcatattgagcgatttttgatatttattcatctccttacgcactatattcagagcaataagttgcctcttttcatcttgattcagcacaacctttgcaactaaaaggagcccatgatggttacagttgtcagcaattattgtcaattatctcaaacgcaactcagtcagacatttgcagaaaaatttactgtgaccgaggaattactgcagtctttaaaaaaaacagcgttatccggagatgaagaaagcattgagttactgcataatattgcgttaggttatgataaatttgggaaagaagctgaagatattctttaccatattgttagaaccccaacaaatgagaccctaagcattatccgacttatcaaaaatgcttgtttaaaattatataatctggcacatatcgcaaccaactcccccctcaaaagtcatgatagtgatgatctcctgttcaaaaaactattctcccctagcaaattaatgacaattatcggtgatgaaattcctcttatatctgaaaaacagagccttagtaaggtgcttttaaatgatgagaataatgaactgagtgatggtacaaacttctgggataaaaatcgtcaattaaccacagatgaaatagcttgctatcttcagaagatcgccgctaatgcaaaaaatactcaagtcaattatcctactggtctctacgtcccctactccaccagaactcacctggaagacgctctcaatgaaaatattaagagcgatccaagttggccgaatgaagtccagttattccccataaatactggcggacactggatattagttagcctacagaaaatagtaaataaaaaaaataataaactacaaataaaatgcgtcatattcaacagtttgcgtgcactaggctatgataaagaaaatagtcttaagcgtgtcattaatagttttaattctgaactcatgggagaaatgagcaataataatataaaagttcatttaaatgaaccagagataatatttttacatgccgatcttcagcaatacttaagccaaagttgcggtgcatttgtgtgcatggcagcccaggaagtgattgaacaaagggaaagcaattctgacagcgccccctatacgttattaaaaaaccatgctgacagatttaaaaaatatagtgcagaagagcagtacgaaattgattttcaacatcgactggcaaacagaaattgttatttagataaatatggcgatgcaaatatcaatcattattatagaaacttagaaataaaacacagtcaacccaaaaatagagcatccggcaaaagagtgagttaacatcattgttaattaattcgaccagtcagcaaatatgctgactggtcgaacatagtttgctaaacagtcatcactgactgatgtcagtcacaccatccgccagttcaatcaggcgaataaattccgccctgtaaccctgtggatcttccccttttgcctgctgagcccactgtttgatctgctgccaggaggtattgttcaggtattcagaaccgcgtaacttttgcccatatgcagctactgctgcgcgaaaacgcatatcttcagagggcgcgtttattgttggccccagcgggaattcaactaactgactttcttttccctgcgggtatttccagcgaatttttaaccaggccagttctttcgttttgtcgcttttcgctaatttgttatccggggcatagcgtaacttatcaatacttgctttttgcccgttcagcgttaattcgaataacaacgttatatgtttgcctgcgcctatatcccctgcatcaacgttgtcgttattaaaatgttccacccgaagttggcgcttttcataaccaatctgacggtattccgttacccacgcggggttaaactcaatttgcgctttgacatcttttgctacggtaatcaacatctgccgcatttcactattcaatactttctgcgcttcagagagggtatcaatgtagctgtagttgccgttaccaacatcggcaattcgcaccatcattgcctcgttgtaattgctattccccacgccaaacgtgctcagagtaacaccagactcccgctgttttttgaccatactttcaatgctttttggatcgtcaatgccaacgttaaagtcaccgtcagtggctaataaaatgcgattgatgccgcccttaataaaccccttcgtcgcctgctgataagccagttccagcccggcaccgccattggtactgccttcggcatccaggctatcaattgcggcattaatttccgccttatgactcccggagatagaaggcaatgcaatacgggagtcgccagcgtaggtcacgatggcaatgttatcctgctcacgaagttctttgaccaataatttcaagctagactggataagtggcaaacgttcatcagaaatcatactaccagaagtgtcgataagaaagaccagattagaagctggtaactcttcacttttgcgatctttcgccaggatatcaactttcagcaatgttcgctgttcattccatggtgcaggtgccaattcgtagcgcatagcgaaaggtattggcttagaggccggaatagattgtttgtctttgatatcccaatcagacgggaaataattgactatctcctccacccgcacagcgtctggcggaggtaacagcccttgattgaggaaacgccttacattcgcataactgccagtgtcaacgtcaagactaaacgtcgccaacggattttgcgctacctgcttaaccggattatcatcgaactgctggtagcgagcggttcctggatttgcgatatgtgtagcttttgctttagccgctcttgcaaatgttggcgcttcctgcaatcgcccctgtaaagcctgtttgtcactatattgttgcacttcttgctgggccaaggctttcgcggcggcggcgctttgctcagcctcttttattgcagcttgctgcgcggcaagcacttgctgctctgtgggagtactgggttgttgttgctgactttccttattctcaggttgcggcccacatccactcaaaatcaaactactcataagcaacatgattatatttttatttcgcatataaaatccttttaaataaactcaggcaccagacataaaatatactctttgtataatcctgctaatcttaataaaatacaatatcgaaacccatagcaaataatgattcaacaacgcaacccattaataatttgcatatgaaaaaaataatctttgcttttattatattatttgtgtttttactccctatgattattttttaccaaccctgggtcaatgcattaccgagtacgccccgacacgcaagtcctgagcaattagaaaaaacagttcgttatcttacacaaactgtgcatccacgtagtgccgacaatattgataatctgaataggtccgcagaatatataaaagaggtctttgtcagtagcggtgccagagttaccagccaggacgtccccattacgggtggcccctacaaaaacattgttgctgattatggtcctgccgatggaccgctgattattattggtgcgcattatgactctgccagcagttatgaaaacgatcaattgacctatacgccgggcgcggatgataacgccagcggtgtggcaggattactcgaactggcacgtttgttacatcagcaagtaccgaaaacaggcgtgcagctggtcgcctatgcgagcgaagaaccgcccttctttcgtagcgatgaaatggggagcgcggtgcatgcagctagccttgagcgtccagtgaaattaatgatagcactggagatgattggctattacgactctgcgcctggaagccagaattacccttacccggcaatgtcctggctttatcccgatcggggagactttattgccgtggtcggcagaatacaggatatcaacgccgttcgtcaggtaaaagcggcattgttgagttctcaggatttatctgtttattctatgaataccccagggtttattcccggtattgatttctctgaccacctgaattattggcaacacgatattcccgccataatgattactgacaccgctttttatcgtaataaacaataccacttgcccggtgataccgcagacagattgaattatcagaaaatggctcaggtagtggatggtgttataactttgttatacaacagtaaataataaaaatttctcgaggcgggtccagaaaaagcgacatgcacattttattttccctcatctgttttaagatgcgaaacatgaaattcaacggaggaaaaataaatgggaatgattggctattttgcagaaattgacagtgaaaagattaaccaactgcttgagtctactgaaaaacctttgatggataatatacatgacacgcttagtggattacgccgactggatattgataaacgctgggattttttacactttgggctgacaggcacctctgcttttgatcccgcgaagaatgatccgctgagtcgtgccgtgcttggtgaacacagcctcgaagatggcatagatggcttccttggattgacctggaatcaggagttagccgcgacaatcgaccgactggaaagtctggatcgaaatgaactgcgtaaacagttttccattaagcgactcaatgaaatggagatttatccgggagtgacctttagtgaagagttagaggggcaactctttgccagcatcatgcttgatatggaaaagctgattagcgcgtatcgacgtatgctgcgacaagggaatcatgcgctgacggttattgttgggtgatatagcttgatgcctgggggagaaagacccattagttaagatttacgccaggatcatcttgaaaaaatctttaaccatggtccggtttttatccccttgtataaatattactaaatgcttgcttagtcgcattgttaaatgcaataccgtatattcggtatgtaacagcgatatcctctgtgctggcaacgatctgtcatgcttgatgaaaacggaattgaacctgtcattaccaggtagataaaaagcctgttcaattttgggattattttttataactcgtgtctgttatggcgacacgggaaaacatcaatattgtccttcacaaattgcagtaatatagaatcaacctctcttgcaagttggtcacaatgtattataagcattttgaatatgtcatcctctgtaatctcgtgaaaattttcggccttgtcttttagctcatcatatcggattcttgcagtaaccattttttgggcgagttctaataaccccaaagcttgcaattgctggtgagtatgatcactttcaaaaaatatcccacactccattccttcccaaccaacatattcatgccattcataaaccagcataaatgtttgtaaaactggcggtaataattggatatctgcaaaaccaaaccaaaacttacgcttgagatcccactcatattcaatcgccaatgctatattgtttaaggcatctccggcatccttatttttacgcaaaatcaattccgtcagtgtatagcgttgttcatcaatacgccgaagagcttctgcaatatcatagtttgtagccaacaaaacattctctgcttcctgatgagtgacgtctgcttttgccgtcaatatattgatttggtcaatatgaaacaacttgatggcttcatcaacatcaccgccagtcctctctaacaaacgtctggcaacctggataccgacaggtacgttcttccgaagtttacgaatttcacttaaccattccatgtcaaacccctttaaatatttatgatattaaatataacaacgtctggataacgacccggcctgactgaatatctcacgttttcctgcttaacattcatgttatgatgctcttgaaactaataatacgtatggaattgtcactatttatctgctaatgaatagtaacaatgtcattcgtttgatgaatatattatttcagggaataattatgacacctttagaacgcattacccaacttgttaatatcaatggtgatgttaataatcctgatactcctcgtccattgttatctcttgaggatttttttattgacaataatatccatggtagtatatgttgcaatgtgattccagaacaatctccgcaagctatctatcaccattttctgaaaatacgtgagcgtaacaatgttagtgatgttttggtagaaattacgatgttcgatgacccagactggccctttagtgaaagtattttagttatcaccactgctagtccagaagaagttcagagctggtttgtagaagaaattgcccctgatgagtgctgggaaggatggagtgaagatacggagcatggatgggttgaagtccctgtgggtatgcatccggttacttgttggtgggattaaaacatttatataaacagataagcggatgtttacataaatttttatgtgaaggaacatgatgaaacttattcctcgcagtagtgatattagtcctggcattgatggaatttgcccggggccttttcctccgaacggatttaccgtacttacagatgcagcatatggtaacggagactgtttcggtttgtactggcctattggtcaggagcataaactacctatagtgtgcgaaacgtaccatgacgaatggcgaatcgtacctgccttttccagcattaagaagttcgaagaatggctggaagtgaatgatgatgatccccatgaaaatggcatcagcatcgaagatcaagactttgcagcaaatctcttccgtgttgctcggaaatgtcttagtacgggaaggcttgatgacgcactgccactgttacagcgagcaacagaacaattgcctgaagtcagcgaatattggttagcactggcaatccagtatcgccgatgtaaaaaaacagaagctgcagcacaggctgcgcttaatgcttatcttggcaattgggcatttggtgttcctgacaataaagtcattcatttgctgagtcaggccgcagatgtcccgaatttccaggatgatcctgtgattcagtgcattaaagaacaaggattagatcttagctttggaggaacaaaggaaaataataattaccccttgatgcagatgtgtgttgatacttattttgcgcagagaaaaccgcttcaggcattaaccctgttacataattatgcctggataatgtccagtgaaacgactgcatttcaggaacgctatgattttaatatcgatgaatggcgggcaaaattcaggcagttatgtttagagtattttggcgatagtcgtacacagttcacttaacgctctgcgtctatctactatcccttctttttcagaaaaaccgccgagcatgtcggcggctttctgacttacaaagtaacagattacatcagcggcattgccaaacgcacaatgctaatcagcggttgtggccatacacccagcaccagtaccaacagtgcagagatcagcacaacgataccgcccgcgctgtactgccagttacttggtgcatcgcgacccggttgttccggggcgtgaagatacaggctcaccgccacgcgcaggtagtagtagaggccgattgcgctaccgacaaccacggcacccaccagccaccacaagtgtgcctggacaccgaccgccagcacgtagaacttaccgataaagcccagcgtcatcgggataccggccagagacagcatcatcaccgtcatcactgccgcgaggatcggacgatgccagaacagaccgcggtaagagaacagggaatcagcatccgggccacgatacgggctggacatcaggctgaccacgccgaacgcgccgaggctgctgaacagataaccggccaggtaaacccctaccgcttccatgctcatctcgccggtttgcagcgcaatcagcgctaccagcagatagccgaggtgagagatagaactgtaaccgagcagacgtttgatattggtctggctcagcgccatcaggttaccgaagatgatggaggcaaaggcgataatcgccagcaccacgcgaatcgcttcgctgtcacccaccggtgcgtagaggaacagacgcatcaccacaccgaagatagcgattttgctcgccgtcgccaggaaagtggaaaccggcgcaggcgcgccctggtatacgtctggcgtccacaggtggaacggcaccagagagagtttgaagccgaggccaacaatcatcaggccgaaacctgccagcaacagcggctcgttgagcataccgtcgccaaggtttttacccaacgcgacaaagctcaggtcgccagactgcgcatacaccagcgccataccaaacagcaggaaagaagacgctgcggcagaaaggatggtgtatttgatactggcttccagactacgtttctggcggaaagcgtaaccgaccaggccaaacagcggcaaagagatcagttcgataccgaggaacagagacgccagatggttggcattcgccagcaggatcccgcccagcgcggcaattaacaccaacaggtagaactcatccttgttgtcgttatagccttcaagccacgggtaggcgaaagtacaggtggcgaggctcgccaacaataccagcccggtgtaaagcatggcgaaaccatcaacgcgcatcagcggcgtaacgtccatagcgcccgcctggccaacaaaccagagcgaaaccagcgccgcgttaagcccaataaccgagagcgtagcgttgaggaaatgattgcgtcgccacgcaatggagagcatcacaaccaccaccgtcaagccgacgatcagcaacggtagcagtgcgatcaggttttgtggagttattgtcatggcgatttacggccttgtagtagtaacggaattaacaaaccactgctggatattgccaatcgcggagtggctggtatccagaatcggctgcggatagaagcccagcagtaccagcagcaccaccagcaacaggatcataaacagctcacgcaggctcatccctggcagttcctggctggcaatctggcttttcgctttaccgaagtaagcgcgatgtaacatcgccaggctataaacagatgcaaagaccagcccaaaggtagagataacggtaatcaccggtacaacctggaagctgccgaacagaatcataaattcgccgacgaagttaccggtgccaggcatcccaagcgttgccaccgcaaagaacaggctcagtgctggcagccatttcatcttgctccacagaccgcccatcatgcgcatgtcgcgggtatggatacgttcataaagctgaccacaaagaataaacagacccgccgcgctcaaaccgtgcgcaatcatctggattaccgcgccctggtaggccaactggctgccggtgtagatagcaatcagcacgaagcccatgtgggaaacgctggtgtaggcgatcagacgtttgatatcggtctgggcgaaggccatccacgcaccgtagaagatgccgataacacccagccacatagcaattggcgcgaactctgcgctcgcgttcgggaacagcggcagggagaaacgcagcaaaccgtaagcggcagttttcagcaagatccccgcgaggtcaacggaaccggcggtcggagcctgggagtgcgcatccggcagccagccatgcagcggaaccaccggcattttgactgcgaaggcgatgaagaagcccagcattaacaggtattccacaccactggacattggcgtattcagcagctcttcatagttgaaggtccagacgccggtcgcattgtagtgaacaaaaaccagcgccaggatggcaatcaacatcaccaggccactcgcctgggtgtaaatgaagaacttggttgccgccgtgatacgcgttttaccgtcagaggctttatgcccccacagtgcgatcaggaagtacatcggcaccagcatcatttcccagaagaagaagaacaggaacatgtcgatggcaaggaacacgccgataacgccgcccaggatccacatcaggttgaggtggaagaagccctgatatttttcgatctctttccagctacatagtaccgccagcacaccgagcagaccggtcagcacgaccatcagcaggctcagcccgtcaatggcgagatgaatagagataccaaaacgcgggatccacggcatgtcgaattcagactgccactgcggaattccggcggattgcgtcagactataaccgccctgcaaccacagttgcaggctcagcgccagcgtcaatcccatggtgatcagcgcgatccagcgtggcaccttgacgccaaagcgttcggtctgccagcacaggaagccgccaataaagggaattaatattagccagggtagtaacatggcgatctttattccttgtaaaagtcccgtcaggaccggattttcaacgaattctcacgacagaaaattctcttcggactgggggtagtgtcggatgcaccgcgaaggcggcttatccgacctacgttcttatatgcccaggggcaatcccacaatccttaactcaacgcagtaccatcaacagtgccagcaccacgaccgcaccgatgctcatggatgccacataccagcgcagatagccgttctcacttaacagcagacctttacctgcaaagcgggaaaggacagccgggatgttcatcatactgttcagcggatcgcgtttcagcaaccaggcaatacccaggaacggcttgacgaacactttgtcatacagccagtcaaatccccaggcgttgtaccaccaggtgcccagcagacggcccggcgcactgttggcgatggaggtcaccagagtacgtttacccagccacagccaggctgccagcagaatgccgaccaccgcgaccacgccagaggtaatttccagggtcaacatgctgccgtgcgccagttccgtcgtttgcggaagcacgccctgcagcggcggtacaatcagtgcgccaacgaaggtggaaaggatcagcagcacaatcagcggcaggctgtgagttacccctttcacggcgtgagcgtgaatttgttcttttccgtggaagacgatgaaaatcatacggaaggtgtagaggctggtcataaacgcaccgaccagacctgccaccatcagattgatatgaccattcgccatcgcacccgcgaggatctcatccttactgaagaagcccgcagtgaccagcggtagtgcgctcagtgctgcgccgcccaccaggaagcagagataaaccagcggaatagatttacgcagaccgcccatcttgaagatgttctgttcgtgatggcaggccagaatgacggaaccggatgccaggaacagcagcgctttaaagaacgcgtgggtcatcaagtggaaaatcgccgcatcccatgcctgcacgccaagcgcgaggaacatgtagccaatctggctcatggtagagtaagcgagaacacgtttgatgtcggtctgtaccagcgcggcaaaaccggccagcagcagcgtaaccgccccgacaatacccaccagatgcagaacttccggcgtcatcaggaacaggccgtgggtacgggcgatcaggtagacacccgcggttaccatggttgcggcgtggatcagcgcggagacaggcgtcgggcccgccatcgcgtcggcaagccatgtctgcaacggcaactgcgcagatttaccgaccgcaccgcccagcagcatcagcgtcgcccacatcagcatgttattgccgtcagcaaagtgcgctggtgccagttccaccatttcgcggaagttcagggtgcccagttcgttgtaaagaatgaacagtgcgaaagcgaggaacacgtcacccacacgggtcacgacgaacgctttcattgccgctgcgccattcttcggatcggtgtaatagaacccgatcagcagataggagcacaggcccacgccttcccagccgaggtacatcagcagcaggttgtcggcaagcaccagaaccaccatgctggcgatgaacaggttggtgtaagcgaagaagcgagagtagccctcttcaccgcgcatataccaggaggcgtacatgtgaataaggaaacccacaccagtgaccacgctgagcatggtcaggctcaggccgtccagcaccaggttaaaaccgatgttaaagtcgcctacgctcatccacgtccacagcggctggctgtatgtctgctcgccgttagcgaagaaatcaacgccgataaaggcggttaccagcgccgccaggcccacagagcctacgccgacgatcgcgctgacgttttcagaccagcgcccacgggagaatgccagcaggacgaagccaatcaatggcaaaataatggttaaggcaagcatgttcatccgcgcatctcacttacactatcgatgttcaggttctggcgacgacggtgaagttgcagcagcagcgcaaggccgatactcgcttctgccgccgcgaggctgatggcgagaatgtacatcacctgaccgtcggtctggccccagtagcttccggcgaccacgaaggccagcgcggaggcgttaatcatgatttccagaccaatcaacataaacagcagattgcgacggataaccagaccggttaagccaagaacgaataagattgccgcgaggatcagtccatgttgtaaggggatcatgcgtgctcctccgtttttcttttcgcgctgtcgtctttacgattgctcagcacttcacccgcacgctcttcacgaccgacgtggaaggccacaaccagacctgcgagcagtagcatagaagccagttccaccgccagtacgtaaggcccgaacagcgtaatacccactgctttagcactgattggcgtaccgtcgataccctgatcgttaacaccgaggatggcgtaaacaatcaccaccagcatgatggcgctcaaaattgccggaccaatccacacctgcggtttcagccactggcgttcctgttcgatttcactaccgcccaggttgagcatcatcaccacgaacacgaacagcaccataatggcacccgcgtagacgataatttccagcgcaccggcgaagtaagcgcccagactgaagaacaccccggaaatcgccagcaggctaataatcaggtacagcagtgcgtgtaccggattggtatgggtgatcactcgcaaggtcgcaagtatggctatcaggccacagatataaaaagcgaactccattgcccctctccttacggtaacaggctcttgacgtcgataggcttggcttcgttctctgcttcgcccttatctttgccgtcgattgccatacctgccatccggtagaagttatattccgggtatttgcccggaccggagatcagcagatcctctttctcgtaaaccagatcctggcgcttgtattcccccatttcgaaatccggggttaactgaatcgccgtggtcggacaggcttcttcgcacagaccacagaaaatgcagcgactgaagttgatgcggaaaaattccgggtaccagcgaccgtctttggtttctgctttttgcaggctgatacagccgaccgggcaggctaccgcgcagaggttacaggctacgcaacgctcttcgccgtccgggtcgcgggtcagaacgatacgaccacgataacggggcggcagatagaccggctcttccgggtacattcgcgtttcgcgtttggcgaacgcgtgcaggccgatcatccagatactacgaacctgggtgccgaaacctactaacaattcttttaaggtcatggtcttattgccccttattgcgcctgccagagaatgacagccgccgttaccagcaagttgatcagcgtcagcggcaggcagattttccagccgaaggacattacctggtcataacgcggacgcggtaagctcgcacgaatcaaaatgaacatcatcataaagaacgcggttttcagcgcgaaccagatgaatggcggtaacaacgggccttgccagccaccgaagaacagcgtcaccatcaatgcagagatggtcacaatcccgatgtactcacccacgaagaacagaccgaacttcataccggaatattcaatgtggtaaccatccgccagttcctgctcggcttccggctggtcaaacgggtgacggtgacataccgccacgcccgcgatggcaaaggtaataaaaccaaagaattgcgggataacgttccacacatgcgcctggctgttgacgatgtcggtcatgttgaaactaccggcctgcgccaccacgcccatcaaggaaagcccgaggaacacttcgtagctcagggtctgcgcagaagcacgcatcgcacccagcaagctgtatttgttgttactactccagcccgcaaacagcaccgcgtaaaccgccagacctgccatcatcaggaagaacaaaatcccgatgttcaggtcggcaaccacccaacccggactgactggcacaatcgcaaaggccagcagcaggctggtaaaggcaatcatcggtgccagggtaaagatgacgcgatcgctgaatttcgggatccagtcttctttaaagaacattttgatcatgtccgcaaccagctggaggctaccgccccagccaacacggttaggtccgtaacggttctggaacagacccagcaggcgacgttcgccaaagctcatgaatgccccgcaggtgacaaccaccagcaggatcaccaccgctttgaggatggtcagcaggatctcaatcagttccggacttatccaactcattgttgtgcctccttgagatcctcaagatgcgcgccagccagcaccggagcaatgccggacatacccatcggcaagcccacctgccctgccgtcagtccttcggcgatttcaaccggcagcgtgaccgtgttgccatcgtaactaaaggagacgcgtgtacctgcgttcacacccaacttcgcggcatccgctgggttgagtttgatgtacggctgcggcatacggctctggaagaccggagcacgctgactcaattcatcgctgccaaacaggtggtaatacggcgcgatacgccatttcccgtcctgcggctggaagcgtgccggtacgctggtgaagtaatccagaccattttcgctggtttcaaacagacgcacgcccggatcgccaaagcgcagtttgccgcccacttcgtcctggaatttgttccacgcctgcggggagttccagcccggcgcccaggcaaacggcacttggctacggtgcgcagtcggctggttgttaccttccatgctgaaggtgaacatggtgtcaatatcctgcggctgacgcggctcatgaacgctgatattggcgcgcatggcggtacgaccgctgtaacggtgcggttcacgggccagtttctgcccacgaatacggaatgtcgcatccggcgcagcatctttgatacctgccagttccgggattttcgccacaacagcgtcaatcacatggtcgagctgcgtccagtccacttcacggctcagcagggtgctgtgcaggctgtgtaaccagcgccagctttccagcatgacagttttgctgtcgtaataagcaggatcgtaaacctggaagaaacgttgggcgcggccttcgttgttgatcaccgtaccgtcgctttcagcaaagctggcagcagaaagtaccagatgggcgttttccataatcgctgtgcgttgatgatcaaccaccatcaccagcggtgctttagccagcgcagcattcacgcggatagcagaagcgtgacgatgcagatcgttttccaacaccaccaccgcgtcggcgcgtccggtttccagttcggttaacgcttcttcaaggctaccgccacccataatgcccagccccatgctgttgacggaacgggcaatcatggtgataccgacgtcagcgccgcgacctttcagggctttcgcgacgttagccgccgcctgaatcacctctaagctaccggcgttcgtcccggagataatcaacggtttcttcgcacctgccagtgcctgcacgatgacgtcgattttgctttgcagctcaggttcgataccgtcaaccgctggtgcagagttatccagcgcatgggcgatggcaaaacctaaacgcgcctgatcttcaaccggtgcgcggtaagtccacgccgcgatatcatccagacgggtgtcatcaacgttggtaacaaacagcggatgcttcgcacgttgaccgatgttgaggattgccgcaatctgccagtcagccactttctgtgctgccgccatttcgcgcgctttacctttcacagcctgacgcactgccagcgcgacgcgcgcgccggtctgggtaacgtcttcgcccagcaccagtaccgcatcgtaagattcgatttcgcgcagagccggagtataaatgccgccttcacgcagcactttcagcgccagttgcagacgttcctgctcaccgtgagcgataccggtgtagaagttttcttcgcccaccagttcacgcagcgcaaagttgctttccacgctggcacgcggagaaccaataccgatcactttcttgctctgacgcagaatatctgccgcgccctgcattgcctgttcggcgttgagggtaatgaaatcatcgccacgacgctgtactggctgacgcggacgatccttcaggttgacgtaaccgtaaccgaaacgaccacggtcgcagaggaagtagtggtttaccgtaccgttgtaacggttttcgatacgacgcagttcgccgtaacgttcaccggggctgatgttacagccgatggaacattgctggcagatgctcggcgcaaactgcatatcccatttacggttgtaacgctcggagtgcgttttgtcggtaaatacgccggtcgggcaaatttcgaccaggttaccggaaaattcgctttccagcgtgccgtcttccgggcgaccgaagtagacgttgtcgtgcgcaccgtaaacgcccagatctgtaccgtcagcgtaatctttgtagtaacgcacacagcggtagcaggcgatgcagcggttcatttcgtgagagatgaatggccccaaatcctgattacggtgggtacgtttggtgaaacggtagcgacggaagctgtgtccggtcatcacaatcatatcctgaagatggcagttaccgccctcttcacataccggacagtcgtgcgggtggttggtcatcaaccactcgaccacgctttcacggaactgtttcgcttcttcgtcgtcaatggaaataaaggtgccatcggaagccggtgtcatacaagacatcaccaggcgaccacgcgtgtcttccgcgttttggtattgcttcaccgcacactggcggcaagcaccgacacttcccagcgccggatgccagcaaaagtaaggaatatcaaggcccagagacagacaagcttccagcaggttgtccgctccgttgacctcgtattctttgccgtctacatgaattgtagccattagcatgcttccagttttctcagtcagagactgagcgttaatcgaaattcggttaccagcgctctttcagcaggttcggctgaatcccattaatcaaatgggtattgctgaacggctgtttgattcccgcctcaaattcttcgcggaaatatttgatggcgctctgtaacggctccactgcaccaggtgcgtgggcacagaaagttttacccgggcctaagaatcgacacagttgctcaagtgtttcgatatcgcccggctgaccttcaccacgctccagcgcacgcagaattttcacgctccacggcagaccgtcgcggcacggcgtacaccagccgcaggactcacgggcgaaaaactcttccaggttacgcaccaggctcaccatgttgatctcatggtcaaccgccatcgccagcgccgtacccagacggctgcccgctttaccgatactttcgaattccatcggcagatcaaggtgcgcttcggtcaggaagtcagtccccgcgccgcctggctgccaggctttaaatttcagaccatcacgcataccaccggcgtaatcttcgaggatctcgcgtgcggtggtgccgaacggcagttcccacagtcccggatttttcacccgaccggagaagcccatcagcttggtgccagcatctttacttttgctgatgttctgataccactccacgccgttagcgaggatcgccggaacgttacacagggtttcgacgttgttgacacaggtcggtttaccccatgcgccggaggttgccgggaagggtggcttgctgcgtgggttagcacgacgtccttccagggagttgattaacgctgtttcttccccgcagatgtagcgccctgccccggtatggacgaacagttcgaaatcgaaacctgttcccataatgtttttgccaagcagacccgcttcggtggcttcggcaatggcacggcgcagattaactgccgcttcgatatattcgccacgcaggaagatgtagccacggtaagctttcagcgcaaacgcggagatgagcataccttccaccagcaggtgcggcagttgctccatcaacaggcggtctttataggtgcccggctccatttcatcggcattacacagcaggtaacggatgttcatggattcgtctttcggcatcaggctccatttcaggccagtgctgaagcccgcgccgccgcgccctttcagaccagcgtcttttacctgattaacgatttcgtccggagacagcccggtcagcgccttacgcgcgccttcgtaaccgtttttgctgcggtattcgtccagccacactggctgtttgtcatcgcgcagacgccaggtcagcggatgcgtttcgggagtacggataatgtttttcatttataccgctccagcagttcagggatcgcttccggggtcagatgcgcgtgagtgtcctcatcgatcatcatgtttggccctttatcacagttccccaggcagcaagttggcagcagcgtaaagcggccatcaaatgtcgtttgccctggtttgatgttcagctttttctcgagcgccgcctgaataccctgataaccgttgatatgacagaccacgctgtcacaataacggatcacatggcgaccaaccggctggcggaagatctgactgtagaacgttgccacaccttcgacgtcgcttgccggaatacccagcacatcggcgatcgtgtggatcgcaccatccggcacccagccacgctgcttctgaacgattttcagcgcttcaatggacgccgcacgcgggtcttcgtagtggtgcatctcgtgctcgatcgcttcacgctctgccgcactcagctcaaaagcctcggtttgtggttgttgattctcgtgcataattagcggtccacatcactcataacaaaatcgatactgcccagataaacaatcaggtcagacaccaggctgccgcggatcgccgccggaatttgctgcaaatgcgcaaagctcggggtacgaacacgggtgcggtaactcatggtgctgccgtcgctggtcaggtagtaactgttgatccctttggtcgcctcaatcatctggaaagattcattggcaggcatcaccggaccccagctcacttgcaggaagtgggtgatcagggtttcgatatgttgcagcgtgcgctctttcggcggcggcgtggtcagcgggtgatccgctttgaacgggccttccggcatgttgttgaggcactgctcaagaatgcgcagactctggcgcagctcttccactttaagcattacgcgggtgtagcagtcagaaacgccaccacccaccgggatttcaaagtcgaagttttcatagccagaataaggacgcgccttacgcacgtcgaagtcgatcccggtagcacgcaggcccgcgccagtggtgccccactccagcgcctctttcgcgccataggcggcaacgccctgggaacgacctttcagaatggtgttttgcagcgccgctttctcgtaagacgccagacgtttcggcatccagtcgaggaactcacgcagcaggcgatcccagccgcgcggcaggtcgtgcgctacgccgccaatacggaaccacgccgggtgcatacggaaaccagtgattgcttccaccagatcgtaaattttctgacgatcggtaaaggcgaagaacactggcgtcattgcgccgacgtcctgaataaaggtgctgatatacagcaggtgactgttgatgcggaacagttcggagagcataacgcgaatgacgttaacgcgatccggcacggtgatcccggccagtttctctaccgccagcacgtaaggcatttcgttaacgcagccgccgaggtattcgatacggtcagtatacggaatgtagctgtgccaggactggcgttcgcccattttctccgcaccacggtggtggtaaccgatgtctggtacgcagtcgacaatctcttcgccatcgagttgcaaaacgatacggaaagccccgtgcgcgctcgggtggttcggaccgaggttgaggaacatgaagtcctcgttttcggtgccgcgcttcatcccccactcttccggtttgaaggtcagggcttccatctccagatcctgtttggctttggtcagctcaaacgggctgaattcggtagcgcgcgccggataatctttacgcagcgggtgacctttccaggtttgcggcatcatgatgcgtcgcaggttcgggtgaccgtcgaaagtaatgccaaacagatcccaggtttcacgctcataccagttagcgttcgggaacagtttggtgaaggtcggtacgtgcaggtcgttttctgccagcgccaccttcagcatgatgtcgcggttacgatcgatagaaatcagatggtagaaaacggaaaaatccgcggcaggtaacccttcgcggtgtgtgcgcagacgttcgtccatgccgtgtaagtcaaacagcatgacgtaaggtttcggcagtttctttaagaaatcgccaacttccagtaattgttcacgcttgatccacacaacgggaaccccggtgcgagtcgcctgaacagtaaaggcatccggcccaaaacggttgcgcagttcgccaatcaccggatcatcaagatgatcgcgggtctgccaggcgggttcttgcgcggttaagtcggtcatattgttcaccattgcaaatggtccgtggtgactgtcggcgcagtaagcttcgcgaaatagatttaggaataagcgaagaaaaatccctttgccgacaggcgcaaattaaatctcgtcaggtgtacgcaggttagttacggcaatgcgttcaccgcgcttgcgttcgcgctcactttgcatattggcgcgataaacgccctgatcgccaaccacccaggagagcggacgacgttctttgccgatagattcctgcaacagcatcagtgcctgcatgtacgcttcaggacgcggcgggcagcccgggatatacacatcaaccgggatgaatttatcgacgccctgcacaacggaataaatatcgtacataccaccagagttggcacaggcacccatactgataacccattttggttccagcatctggtcatacagacgctgaataaccggtgccattttggtaaagcaggttcctgcaaccaccatcaggtcagcctgacgcgggctagcacgcaatacttctgcgccaaaacgcgccacgtcatgcaccgcggtaaagctagtcaccatctcaacgtaacagcaggaaagaccgaagttatacggccaaatactgtttttacgaccccagttaaccatgtcattgagcttgcccataaacacgtttttgttaacttcttgctccagagggtcggttacgatctcctgcttttgcagggggtaacggtcgttctcaccgttgggatctatgcgggtgagcgtataatccatcttaatgcctcgcggttagcgttgacgattagcgatactgttcgtttccgggttcatacgctcgcggcgactacgcgcgggcgtccagtccagcgcgccaatacgcaccagataaaccagacctgccagtaacacaaaaataaaaattgcagcttccacaaagcctacccagccgctttcgcggatagaggtactccatgcgaacagatacagcgcttcaacgtcgaagataacgaagaacatggccaccagataaaacttggcggacaggcgtaagcgggcggagccgacgctgtcgataccggattcaaacggcacgtttttgctcctcgcgcgtgcgcgaccgcctaaaaaccaaccgcctaccagcatcaggcaacacaggccaatggcaacgataagaaagatagcgaatgcccagtgatgagcgatgacttcagtggatgtactcatactcattgcttactcatcaaaagtagcgccagattcactgctcttcacggcagatggacgccacatcgattcatggggaggaataaaaaaaaccttacaatcactgtagaaattcttttatacagctaattgatgtggttttttactcctttctataaccttttgtcaactttaacaaaagtttcttcacattagtttacataatatcaacaccattagcatttaatgccctttcaccccagatccttgacgactccaggataattagatgttgttgaatcgtgtccgttgtgaagcaatggaaaaaatacgggtctattttgacaggaatttgtgtcgattcctccccccaaaagagagtattttcttgatctgtgacacgcttttgtcattccataacaaaaacgcagcaacaaatttacgtattttttaacatcattgtagcaggtgatttttttcaggcgattatttgtgcgttcgggacgtgaatctctggtggttgaaaaatgaacagttttgtacgttctgcactatgcgatgaaggatttttactaaaaaaaagccgctggggtttaaaacacccccagcggctcgttttttacactattgtctcaggaattatctatcgtccgtcgattactcgatatccctttcaatcaacaaactatcatccccttccggagcagacattgggctgtattgccacggattatggtagctctccatcgcctgatagatcacctgggccagctcattattactggacggatcatagcacagcaaatattcggtatcaggtagcggcggtaagccatctactccactcagcacacgcaggtccgggctcatcatctcaaccggccttgccgtcacgccaagaccggctttcactgccgcacgaacggccggaagcgtgctggcgacataagccagtcgccatggaatatctgctttattaagcgtcgccagcaccatatcgcgaaacgggctaggatcatccagcaatacaagagggatcggctcgcctttttgcaatatgtattccgctgcgcagtaccagtgtgttgggctggtacgcaggttcaatgccttaaacgcactaggacgatgggtggttaccatcaaatccacttcctgggattccagcatttctgccatataggcattacgtttaacgcggacatccagcgctaatttcggataaacgctactcacgcgatttaacaggaaaggtaagatcgtatcggcagattcatcactagcaccgatagttaatacgccctgaagattactgaacattaaactactgcaggcctcatcattaaaacgcaggattttcctggcgtaaccaagaagttgaatgccatgttcagttaacagtttgttgcgaccgtgacgagcgaacagttctttcccaacgagttgttccagacgctgcatttgctgacttacggcggactgagtacgacacacagcggcagctgcggcagcaaaagtgttcagatcggcaacagcaacaaatgttctcagcagatcgaggtcgaggttaattatcggacgatttgcacttatcatatattatcacttactggcggctcatactgagctggttaatgctgtgcacacacaaacaagcaattccatttgtaatgtgcctccctggcagtttcatccggaacccggacgaaagtaaaaatgcatatgagttgcactaaaaaagcgactcacattgttccgttataatgcctgaagtagatcacagaatatatcttcagggatcgcatatctattaagttactcactcttttctatttatgacatgcgcgtgtttgtataaatgtaaatgtgagtccttgttccactctcgtgcagcatcgctggtcatacgcgaacacgtaccaacagcaatggtgaggcggcatcaagagcagggatccgtcatttatccgagcattttaccccaaaaaccttttatttataagggtcattgcgaattatctgatgcaaagttatgttatgttaggcaaagtaatcttctattattaataagcacatcaaaacctttttgaatattaaataataattaattagcatcatcctcattcattaattccgcttaacaatagtttcacaccttgcccccattgcgacacctcggaaatcatcacgcagttaaactctccgtaatgaggaaatatcatcatcgcgtttcattagtgaattcttaaatgaggcattttcacacaattatcttacagataaaaaaaccagacttacaattaagaatcagaacaattcactatataacattgcatgtaaagcatatacacctcattattttgtcattattaagttattaacagcacaatcgagccttcccctctggcaaaatcttattctgcagaccttcaaaacaccgtcctgggggagtacattgttctaagctgacttccacggcagggagtggcgataacagcaaaaaaggtcaagattcatgtcccccattgaaaaatccagcaaattagagaatgtctgttatgacatccgtggtccggtgctgaaagaagcaaaacgcctggaagaagaaggtaacaaggtactgaaactgaacatcggcaacccagccccgttcggttttgacgcgccagatgaaatcctcgttgacgtgatacgcaacctgcctaccgctcaagggtattgcgattccaaaggtctttactccgcgcgtaaagccatcatgcagcactaccaggctcgtggcatgcgtgatgttaccgtggaagatatttacatcggcaatggtgtaagcgagcttatcgttcaggcaatgcaggcattgctgaacagcggggacgaaatgttggttcctgcaccagattacccactctggaccgcggcggttagcctttccagcggtaaagcggtgcattatctttgcgatgaatcctctgactggttcccggacctcgatgatattcgcgctaaaattacgcctcgtacgcgtgggatcgttattatcaacccaaataacccaaccggcgcggtatattccaaagagcttttaatggagattgtggagattgcacgtcagcataatctcattatcttcgccgatgaaatttatgacaaaattctctacgacgacgctgagcatcacagtattgcgccgctggcacctgacctgctgaccattacctttaacggactgagcaaaacgtaccgcgttgcaggcttccgtcaggggtggatggtgttgaacgggccgaaaaaacacgccaaaggctacatcgaaggtctggaaatgctggctagtatgcgcctgtgtgctaacgttcctgcgcaacacgccattcagaccgcgctaggtggttatcagagcatcagtgaatttattacccctggcggtcgtctttatgagcagcgtaaccgcgcgtgggaactgatcaacgatattccgggcgtttcctgcgtgaaacctcgtggtgcgctgtatatgttcccgaaaatcgacgccaaacgctttaacattcacgacgatcagaaaatggtgttggatttcctgttgcaggaaaaagttctgttggtgcaagggacggcattcaactggccgtggccggatcacttccgcattgtcacgctaccgcgtgtcgatgatatcgagctgtctttgagcaagttcgcgcgtttcctttctggttatcatcagctgtaatcttaatttcactgccggagattgcatccggcagcgttatcccgccacaatgacctgatgatgtcatcatacgtaaggtcactatgaaacagagccatttttttgcccatctctcccgcctgaaactcattaaccgctggccgctcatgcgcaacgtgcggacggaaaatgtgtccgaacacagtttgcaggtagcgatggtcgcccatgcgctggcagctatcaaaaatcgaaaatttggcggtaatgtcaacgccgaacgtatcgctttactggcgatgtaccacgatgccagtgaagtgctcaccggcgatctccctactccggtgaaatacttcaatagccaaatcgctcaggagtacaaggctattgaaaaaatcgctcagcaaaaactggtcgatatggttccggaagagctgcgggatatctttgcgccgttaattgacgagcatgcatatagcgatgaagaaaaaagcctggtgaaacaggcagatgcactgtgtgcatatctgaaatgtctggaagaactcgcggccggaaataatgaattcttgctggcaaaaacgcgactggaagcgacgcttgaagcgcgtcgcagccaggagatggactacttcatggaaatatttgttcccagcttccatcttagcctcgatgagattagccaggatagtccgctgtaagcagccggagtctgcgtcgcatcaggcaataagcgccggatgcgacatcaggctcttgtcaaaacggaaacagcatcgggatcatcaccacacaaaccgccatcacgataatggtgaacggtacccccaacttcacaaagtcactgaagctgtaatttcccggacctaaaaccagtgtgttaacaggactagaaaccggtgtcataaaggcggcggatgctgccatcgccacgaccatcgcgaatggataagggctcacccccatcgttttggcagcagccagcgcaatcggagccatcaacaccgccgtcgcggtattagagataaatagcccaataaccgcgctcaagacaaacaaacaccccagcatcatatgtggcccgtaaccaccgccaatgtccatcagccctttcaccgccagcgcgacacctcccgttttctgtaatgccacagcaaacggcatcatcccaacgatcaaaataatgctcggccagtgaatggatttataggcgctttcagcatctatacagcggaatttccccatcagcaggcaggcgatgatagcggcaacaggattaggaatttcatctgtcagcattaacgccaccattagcaccagacagaaaatggcatggggtgcctggctgtgcgcgggacttgcttcactcacctcttccggtaagttcagcgctacgaagtcgcggccctgtttggccagcataccgatcagtttccagttacccacaaccaggatgatatcgcccagcagcagaggctcatccgccaggctaccttccagcgccacgccattgcgctttagccccaccacattcagtccgtagcgggtacgaaaaccaatttcgcgcacgcttttaccaatcagttcactctcaggaattaaactaatctctgccatgcccacatcaagggcctggtcagaaaatactcgccgcgcagtaccatcggctccagcaattgctcactacaaaattgccggagatcgacatcagccgcagacatatcaataagcaaaacgtcacgcgcgcgaaattcagaaaccccattaacgttcacgataacgcgacgaaaacgccgccagcgttcaacaccgatgacgttagcgccataacgctcacgtaatttgagatcatccagccgttgaccaatcattgggcttccggggcgaatagccagacgtcgcgcacgcccggtcagtcgatattcacggataagatcgcgaaaggttcgacgcgtccagccttcgcgctgcggggtctgggtatcccctttcagcatgaaacgcatcactaacatatacaaaatacccagcaccagcacgaccaggccaataggtgttacgctaaagaaactgaagccgtgatagccttcacgcagcaattcactgttgactaccaggttcggcggcgtcgccaccagcgtcatcatgccgctaatcagcccggcaaaacttaacggcatcatcagacgactcgggctcgtttgcatacgcatggcaacgcttaacaccacgggaataaagatagcgacaacgccggtactactcataaacgcgccaagccccgcgacggtcagcatcaacaaaaccaacattttgatttcactattgcccgcaactttgaccagccatgttcccattacggtggcaacaccggtacggaccaaaccatcgccaataataaacaaggcggcaatcaggacaacgttaggatcagaaaagccggaaaatacttctgggactgtcagcgttccgcttaatgcaaacgcgacaataacaaacaaagcgaccgcatccatacgcactctgcccgtcgcaaacaagacgatggcaacggccagtaaactaagaacccaaatcaattcaccgttcacaacttatccttgttaattgagggggatgacttgattctgccataaaaaagccccgacgagacggggctaaatcatgatcaggtgtttcactgaataataacatcgccatttggctgtttggtcacagtaatttgctccagactgtggaggaccaaatcgacctcattcaggcgcggggtatctgccggagcgttaaccgcaatgacatgacaacccgccgccaggccagaaagcacgccagcgggagcatcttccaccaccacacactcctgcggcgcaagccccagcagctgcgcgcctaacagatacgcatcaggttctggttttccgcgcttcactcgctcagcggttacaaacacctctggtgcgggaagcccagctattttatggcgcgctcgcgctaccggcatggagccagaagtcacaatggcccacggaatacctgctttattcaaatgactgagtaaggcgattgcccccggaagcgcggtaataccttcggtttccgtggcctcgatgtgctccagacgcgtaaactcggcggcaatatcagcctcggatttgcccgccataaaatggcgcagagaggtgatcgcctgtttaccgtgaatgaaagccagcacctcttccggcgctaacccatgacgtctggcccagttgctccacgcccgttctaccgcaggcagggaatccaccagcgttccatcaagatcaaacagaaaacctttgcaccgcacgcgggcctcctcaggcattgataatttgattaatttcgttggcgctcaaatggtactgacgcgggcaggcatgccacacattaagcatgcgctgatatttttcccacattggcgtctgggcgttaaaaccgtgagttccggcgtcaaaatgggtatagcgcccttccacattaaccataaagcggacataaccgaggtaacgtgcttcagtggcggcgtcaaagccgaggaaggtgacacgacgttcatcgatggattgctggtcctgcaaattagaccaggaaacatgcaacgcatgatacatctccataatgtcgatgatagtgcggcaggtttcttctttcagctcgccaaactcgcgatccaattcacgcatctgtaatccgtaaccacgctcaataattgtttgcaggcgacggtaacgttcagcatttgccggatcgagcatagtcatcatcttgtactgattagacaaaataagacgttgcgcgttggtcatttccattgttgactcctgtatcactctactacggtgaaaaaaaagaaggctgagtatgccttcttttatatgcgtaatcaggggtcaattacaaatcatcaaggaaagttttatccagttgtttgaaggcgcgcttaagcgtgtcagctaatgcctggtaatcaggcttgccttcaacgggtgccaacacctgtccagactcctgcaatttaccgcgaacttcataaaaccagttaaggattgcagggggtaatggcgtgacagaacgcttgcccagccaccacaatccctgcatgggtaaacttaaggcgaacagggcagtggcaactgccggcccaagctgaccgcccagggcaatctgccagcagagagtaaatacggcgatcggcggcataaaacggatcgcataacgcgtcatcttgataacgcgattttcgacaaagaccggggcaaggcgtttttccagcggccacgtcttactgtaatgctgtccccggcgaaacaagctaaaaaaattaacagaacgattatccggcgtactcatgcttcacctcaacttcacatataaagattcaaaaatttgtgcaaattcacaactcagcgggacaacgttcaaaacattttgtcttccatacccactatcaggtatcctttagcagcctgaaggcctaagtagtacatattcattgagtcgtcaaattcatatacattatgccattggctgaaaattacgcaaaatggcatagactcaagatatttcttccatcatgcaaaaaaaatttgcagtgcatgatgttaatcataaatgtcggtgtcatcatgcgctacgctctatggctccctgacgtttttttagccacgtatcaattataggtacttccatgagcagtaagttagtactggttctgaactgcggtagttctagtctgaaatttgccatcatcgatgcagtaaatggtgaagagtacctttctggtttagccgaatgtttccacctgcccgaagcacgtatcaaatggaaaatggacggcaataaacaggaagcggctttaggtgcaggcgccgctcacagcgaagcgctcaactttatcgttaatactattctggcacaaaaaccagaactgtctgcgcagctgactgctatcggtcaccgtatcgtacacggcggcgaaaagtataccagctccgtagtgatcgatgagtctgttattcagggtatcaaagatgcagcttcttttgcaccgctgcacaacccggctcacctgatcggtatcgaagaagctctgaaatctttcccacagctgaaagacaaaaacgttgctgtatttgacaccgcgttccaccagactatgccggaagagtcttacctctacgccctgccttacaacctgtacaaagagcacggcatccgtcgttacggcgcgcacggcaccagccacttctatgtaacccaggaagcggcaaaaatgctgaacaaaccggtagaagaactgaacatcatcacctgccacctgggcaacggtggttccgtttctgctatccgcaacggtaaatgcgttgacacctctatgggcctgaccccgctggaaggtctggtcatgggtacccgttctggtgatatcgatccggcgatcatcttccacctgcacgacaccctgggcatgagcgttgacgcaatcaacaaactgctgaccaaagagtctggcctgctgggtctgaccgaagtgaccagcgactgccgctatgttgaagacaactacgcgacgaaagaagacgcgaagcgcgcaatggacgtttactgccaccgcctggcgaaatacatcggtgcctacactgcgctgatggatggtcgtctggacgctgttgtattcactggtggtatcggtgaaaatgccgcaatggttcgtgaactgtctctgggcaaactgggcgtgctgggctttgaagttgatcatgaacgcaacctggctgcacgtttcggcaaatctggtttcatcaacaaagaaggtacccgtcctgcggtggttatcccaaccaacgaagaactggttatcgcgcaagacgcgagccgcctgactgcctgatttcacaccgccagctcagctggcggtgctgttttgtaacccgccaaatcggcggtaacgaaagaggataaaccgtgtcccgtattattatgctgatccctaccggaaccagcgtcggtctgaccagcgtcagccttggcgtgatccgtgcaatggaacgcaaaggcgttcgtctgagcgttttcaaacctatcgctcagccgcgtaccggtggcgatgcgcccgatcagactacgactatcgtgcgtgcgaactcttccaccacgacggccgctgaaccgctgaaaatgagctacgttgaaggtctgctttccagcaatcagaaagatgtgctgatggaagagatcgtcgcaaactaccacgctaacaccaaagacgctgaagtcgttctggttgaaggtctggtcccgacacgtaagcaccagtttgcccagtctctgaactacgaaatcgctaaaacgctgaatgcggaaatcgtcttcgttatgtctcagggcactgacaccccggaacagctgaaagagcgtatcgaactgacccgcaacagcttcggcggtgccaaaaacaccaacatcaccggcgttatcgttaacaaactgaacgcaccggttgatgaacagggtcgtactcgcccggatctgtccgagattttcgacgactcttccaaagctaaagtaaacaatgttgatccggcgaagctgcaagaatccagcccgctgccggttctcggcgctgtgccgtggagctttgacctgatcgcgactcgtgcgatcgatatggctcgccacctgaatgcgaccatcatcaacgaaggcgacatcaatactcgccgcgttaaatccgtcgctttctgcgcacgcagcattccgcacatgctggagcacttccgtgccggttctctgctggtgacttccgcagaccgtcctgacgtgctggtggccgcttgcctggcagccatgaacggcgtagaaatcggtgccctgctgctgactggcggttacgaaatggacgcgcgcatttctaaactgtgcgaacgtgctttcgctaccggcctgccggtatttatggtgaacaccaacacctggcagacctctctgagcctgcagagcttcaacctggaagttccggttgacgatcacgaacgtatcgagaaagttcaggaatacgttgctaactacatcaacgctgactggatcgaatctctgactgccacttctgagcgcagccgtcgtctgtctccgcctgcgttccgttatcagctgactgaacttgcgcgcaaagcgggcaaacgtatcgtactgccggaaggtgacgaaccgcgtaccgttaaagcagccgctatctgtgctgaacgtggtatcgcaacttgcgtactgctgggtaatccggcagagatcaaccgtgttgcagcgtctcagggtgtagaactgggtgcagggattgaaatcgttgatccagaagtggttcgcgaaagctatgttggtcgtctggtcgaactgcgtaagaacaaaggcatgaccgaaaccgttgcccgcgaacagctggaagacaacgtggtgctcggtacgctgatgctggaacaggatgaagttgatggtctggtttccggtgctgttcacactaccgcaaacaccatccgtccgccgctgcagctgatcaaaactgcaccgggcagctccctggtatcttccgtgttcttcatgctgctgccggaacaggtttacgtttacggtgactgtgcgatcaacccggatccgaccgctgaacagctggcagaaatcgcgattcagtccgctgattccgctgcggccttcggtatcgaaccgcgcgttgctatgctctcctactccaccggtacttctggtgcaggtagcgacgtagaaaaagttcgcgaagcaactcgtctggcgcaggaaaaacgtcctgacctgatgatcgacggtccgctgcagtacgacgctgcggtaatggctgacgttgcgaaatccaaagcgccgaactctccggttgcaggtcgcgctaccgtgttcatcttcccggatctgaacaccggtaacaccacctacaaagcggtacagcgttctgccgacctgatctccatcgggccgatgctgcagggtatgcgcaagccggttaacgacctgtcccgtggcgcactggttgacgatatcgtctacaccatcgcgctgactgcgattcagtctgcacagcagcagtaatctcgtcatcatccgcagctttgcgctgcggatatctgaaccggaaataatcactatttccggttttttattctcttaatttgcattaatcctttctgattatcttgcttaactgcgctgcatcaatgaattgcgccatcccactttgcatacttaccactttgttttgtgcaagggaatatttgcgctatgtccgcaatcactgaatccaaaccaacaagaagatgggcaatgcccgatacgttggtgattatcttttttgttgctattttaaccagccttgccacctgggtagttccggtggggatgtttgacagtcaggaagtgcagtatcaggttgatggtcaaacaaaaacacgcaaagtcgtagatccacacagttttcgcattctgactaacgaagcaggcgaacctgagtatcaccgcgtacagctgttcacgacgggcgatgaacgcccgggcctgatgaacttcccgtttgaaggattaaccagtggaagcaaatacgggacagccgttggcatcatcatgtttatgctggtgattggcggcgcgtttggcattgtgatgcgtacaggaaccattgataacggtatcctggcgcttattcgccatacccgcgggaatgaaattctctttattcctgcgctgtttattctgtttagtcttggcggcgcggtatttggtatgggagaagaggccgtcgcctttgccattatcatcgcaccgctaatggtccggctgggctatgacagtattaccaccgtcctggtgacctatattgccacgcaaatcggttttgccagtagctggatgaacccgttttgtgtggtcgttgctcaggggattgccggcgttccggtgctttctggctccgggttgcgtatcgtggtgtgggttatcgccactctgattggcctgatctttaccatggtgtacgccagtcgagtgaaaaagaatcctcttctgagtcgcgtgcatgagtccgaccgcttctttcgtgaaaagcaggctgatgttgaacaacgtccgtttacctttggtgactggctggtattgattgtcctga
